(19) United States
(12) Patent Application Publication
(10) Pub. No.: US 2003/0229922 A1
(43) Pub. Date: Dec. 11, 2003

(54) Materials and methods for the modification of plant cell wall polysaccharides

(75) Inventor: Leonard N. Bloksberg, Remuera (NZ)

Correspondence Address: SPECKMAN LAW GROUP, 1501 WESTERN AVE, SUITE 100, SEATTLE, WA, 98101, US

(73) Assignees: GENESIS RESEARCH AND DEVELOPMENT CORPORATION LTD., Parnell (NZ); RUBICON FORESTS HOLDINGS LIMITED

(21) Appl. No.: 10/393,840

(22) Filed: Mar. 20, 2003

Related U.S. Application Data
(63) Continuation-in-part of application No. 09/636,800, filed on Aug. 10, 2000, now abandoned.
Application No. 09/636,800 is a continuation-in-part of application No. 09/170,862, filed on Oct. 13, 1998, now abandoned.
(60) Provisional application No. 60/148,426, filed on Aug. 11, 1999.

(51) Int. Cl. A01H 1/00; C12N 15/82; A01H 7/00; C07H 21/04; C12N 9/24; C12N 9/42; C12N 5/04

(52) U.S. Cl. 800/284; 800/319; 536/23.2; 435/69.1; 435/320.1; 435/200; 435/419; 435/209

(57) ABSTRACT

Novel isolated polynucleotides and polypeptides associated with the synthesis of plant cell wall polysaccharides are provided, together with genetic constructs comprising such sequences. Methods for using such constructs for the modulation of polysaccharide content in plants are also disclosed, together with transgenic plants comprising such constructs.

### REFERENCE TO RELATED APPLICATIONS

[0001] This application is a continuation-in-part of U.S. patent application Ser. No. 09/636,800 filed Aug. 10, 2000, which is a continuation-in-part of U.S. patent application Ser. No. 09/170,862 filed Oct. 13, 1998, and claims priority to U.S. Provisional Patent Application No. 60/148,426 filed Aug. 11, 1999.

### TECHNICAL FIELD OF THE INVENTION

[0002] This invention relates to the field of modification of cell wall polysaccharide content and composition in plants. More particularly, this invention relates to enzymes involved in the synthesis of plant cell wall polysaccharides and nucleotide sequences encoding such enzymes.

### BACKGROUND OF THE INVENTION

[0003] Plant cells are characterized by having a rigid cell wall. These cell walls are comprised primarily of polymers of simple sugar monomers linked in a variety of linear or branched polymers known as polysaccharide. The most abundant simple sugar monomer is glucose, and the most abundant polymer is cellulose. Cellulose is a linear, unbranched polymer, comprised of β-1,4 linked glucose monomers. Other polysaccharides found in plant cell walls include hemicellulose, which is a group of polysaccharides comprised of β-1,4 linked glucose monomers having side chains which may include sugars other than glucose. These side chains frequently include xylose, fucose, arabinose, and galactose. Pectins are another type of polysaccharide found in plant cell walls. Pectins are acidic polysaccharides, which are generally comprised primarily of galacturonic acid and rhamnose sugar monomers. Amylose is an additional common plant polysaccharide which is not usually found as a major component of cell walls. It acts primarily as a storage material for glucose, rather than as a structural polymer. However, because amylose is comprised primarily of α-1,4-linked glucose monomers, it is considered to be a related polymer from a biochemical and physiological perspective.

[0004] Plant polysaccharides have many uses. Certain plastics, such as cellulose acetate, and synthetic textiles, such as rayon, are made from cellulose. In addition, some biodegradable plastics and digestible medicine capsules, as well as medical fillers and fiber additives for food, can be made from plant polysaccharides.

[0005] In foodstuffs, polysaccharides have a profound impact on food quality. Cell walls contribute to crispness in carrots, while degradation of cell walls is required for softening of fruits, such as peaches and tomatoes. In maize, increased amylose is desirable for cattle feed, but not for human consumption, and increased cell wall strength reduces digestibility. In fiber crops, such as timber, cellulose is the primary polymer of interest. Wood density, a fundamental measure of structural timber quality, is essentially a measure of cellulose content. In the paper pulping industry, efficiency is measured in terms of yield of cellulose. Clearly, the ability to increase cellulose content in timber is an important economic goal.

[0006] The sugars which make up plant cell wall polysaccharides are produced in the photosynthetic organs of plants. The sugars so produced are commonly converted into sucrose, a disaccharide consisting of glucose and fructose. Sucrose is transported throughout the plant, to wherever sugar monomers are called for. Thus, the photosynthetic organs are often referred to as a source, while tissues requiring large amounts of sugar monomers are referred to as a sink. Actively growing regions of the plant are generally sink tissues, as new cell wall synthesis requires large amounts of sugar monomers.

[0007] When the transported sucrose arrives at the sink destination, it must be converted into whichever kind of sugar monomer is required. The sugar monomers which make up plant cell walls are primarily 5- or 6-carbon sugars. Different sugars are generally distinguished by stereospecific orientation of hydroxyl groups. Plants contain a variety of enzymes, such as isomerases or epimerases, which can rapidly change the orientation of these hydroxyls. In addition, there are a number of enzymes which can add or remove a single carbon from a sugar monomer. The result is a single pool of sugar monomers which the plant can freely inter-convert into whichever kind is needed for cell wall synthesis.

[0008] Plant polysaccharides are thus biochemically and physiologically inter-related. All polymers compete for the same pool of sugar monomers, and all sugar monomers can be freely interconverted to other types. Degradation of any one polymer will provide building material for any other. Attempts to engineer changes in one polymer may therefore have pleiotropic effects on other polymers.

[0009] The rate of cell wall synthesis is dependent on both the availability of sugar monomers to serve as building blocks for the polymers of the wall, and the enzymes which polymerise those building blocks into polymers. Enzymes which are directly responsible for the synthesis of the major cell wall polymers, such as cellulose, hemicellulose and pectin, may have a profound impact on the rate of cell wall synthesis. Source-sink relations may play an important role in limiting cell wall synthesis, if the availability of substrates becomes limiting. Polymer degrading enzymes may liberate sugar monomers from unnecessary polymers for use in building new, desired polymers. Enzymes which can isomerise sugars from one form into another can convert the sugars into whichever kind is needed. Each of the different types of cell wall polysaccharides effectively competes for the same pool of sugar monomers, and each represents a potential source of monomers for any of the other polymers.

[0010] The final committed steps in cellulose biosynthesis involve a relatively small number of enzymes. Cellulose synthase (CEL) is believed to function as part of a large, membrane-bound complex which also includes sucrose synthase (SUS: Amor et al., Proc. Natl. Acad. Sci USA 92:9353-9357, 1995) and annexin (ANX: Clark and Roux, Plant Phys. 109:1133-1139, 1995). This enzyme complex polymerises activated glucose into the cellulose polymer. The glucose is activated by UDP-glucose pyrophosphorylase (UGP), also known as UTP-glucose-1-phosphate uridylyltransferase. These enzymes are believed to be sufficient for the biosynthesis of cellulose from glucose. Other than these steps, the availability of glucose appears to be the most significant rate-limiting step in cellulose biosynthesis.

[0011] Glucose is primarily stored in most plants as amylose. Plants routinely store amylose and degrade it to free up the glucose monomers, as needed. By inhibiting the efficiency of glucose storage, or by increasing the liberation of glucose from amylose, the availability of glucose monomers for cellulose biosynthesis can be increased. The rate-limiting enzyme in the storage of glucose as amylose is ADP-glucose pyrophosphorylase (AGP), also known as ATP-glucose-1-phosphate adenylyltransferase (Iglesias et al., J. Biol. Chem. 268:1081-1086, 1993). Conversely, the enzyme most responsible for liberating glucose from amylose is amylase (AMA: Kawagoe and Delmer, Genetic Engineering 19:63-87, 1997).

[0012] These enzymes clearly will be important in the engineering of economically useful changes in cellulose biosynthesis. In addition, there are many other enzymes which may be useful in influencing plant cell wall polysaccharide biosynthesis. Other enzymes likely to be involved in cellulose biosynthesis include 1,4-β-cellobiohydrolase, β-glucosidase, calnexin, cellobiose epimerase, cellobiose phosphorylase, cellulase A, dextransucrase, invertase, phosphodiesterase, phosphoglucomutase, sucrose phosphate synthase, sucrose phosphorylase, UDP-glucose 4-epimerase and UDP-glucose dehydrogenase. Enzymes believed to be involved in hemicellulose biosynthesis include β-glucanase, arabinan synthase, GDP-fucose pyrophosphorylase, GDP-mannose pyrophosphorylase, 1,3 and 1,4-β-glucanases, 1,3 and 1,4-β-glucosidases, mannose-6-phosphate isomerase, nDP-hexose pyrophosphorylase, xyloglucan endotransglycosylase and xyloglucan synthase. Enzymes likely to be involved in pectin biosynthesis include α-galactosidase, β-glucuronidase, exopolygalacturonase, glucuronosyl-transferase, pectin methyl-esterase, polygalacturonase and UDP-hexose-1-phosphate uridylyltransferase. Enzymes believed to be involved in amylose biosynthesis include α-glucosidase, amylopectin 6-glucanohydrolase, amylopectin-branching glycosyltransferase, β-amylase, branching enzyme, inulosucrase, isoamylase, isomaltase, levansucrase, starch phosphorylase and starch synthase. Enzymes likely to be involved in the interconversion of 5-carbon sugars include 2-dehydro-3-deoxy-gluconokinase, aldehyde reductase, arabinose isomerase, D-arabinitol dehydrogenase, D-xylulose reductase, endo-1,4-β-xylanase, exo-1,4-β-xylanase, L-arabinose isomerase, L-ribulokinase, L-xylulokinase, phospho-ribulokinase, ribose 5-phosphate isomerase, ribulose-phosphate-3-epimerase, ribulose-phosphate-4-epimerase, transaldolase, transketolase, xylose isomerase and xylulokinase. Enzymes likely to be involved in interconversion of 6-carbon sugars include 6-phospho-fructo-1-kinase, 6-phospho-fructo-2-kinase, trehalose phosphate synthase, aldolase, aldose 1-epimerase, D-fructokinase, D-galactokinase, fructose 1,6-diphosphatase, gluconolactonase, glucose 1-phosphatase, glucose 6-phosphatase, glucose 6-phosphate dehydrogenase, glucose-phosphate isomerase, hexokinase, phosphoglucomutase, trehalase, trehalose phosphatase and UDP-galactose dehydrogenase.

[0013] While DNA sequences encoding some of the enzymes involved in the biosynthetic pathways of plant cell wall polysaccharides have been isolated for certain species of plants, genes encoding many of the enzymes in a wide range of plant species have not yet been identified. Thus, there remains a need in the art for materials useful in the modification of cell wall polysaccharide content and composition in plants.

### SUMMARY OF THE INVENTION

[0014] Briefly, the present invention provides polynucleotides isolated from eucalyptus and pine which encode enzymes involved in the synthesis of cell wall polysaccharides. Genetic constructs including such sequences and methods for the use of such constructs are also provided, together with transgenic plants having altered cell wall polysaccharide content and composition.

[0015] In one embodiment, the isolated polynucleotides comprise a nucleotide sequence selected from the group consisting of: (a) sequences recited in SEQ ID NOS: 1-29, 57-80, 105, 107, 109-113, 119-128, 139-143, 149-933 and 955; (b) complements of the sequences recited in SEQ ID NOS: 1-29, 57-80, 105, 107, 109-113, 119-128, 139-143, 149-933 and 955; (c) reverse complements of the sequences recited in SEQ ID NOS: 1-29, 57-80, 105, 107, 109-113, 119-128, 139-143, 149-933 and 955; (d) reverse sequences of the sequences recited in SEQ ID NOS: 1-29, 57-80, 105, 107, 109-113, 119-128, 139-143, 149-933 and 955; and (e) sequences having either 75%, 80%, 90%, 95% or 98% identity, as defined herein, to a sequence of (a)-(d).

[0016] In a further aspect, isolated polypeptides encoded by a polynucleotide of the present invention are provided. In specific embodiments, such polypeptides comprise an amino acid sequence selected from the group consisting of SEQ ID NOS: 30-56, 81-104, 106, 108, 114-118, 129-138, 144-148, 934-954 and 956, and variants thereof.

[0017] In another aspect, the invention provides genetic constructs comprising a polynucleotide of the present invention, either alone, in combination with one or more of the inventive polynucleotide sequences, or in combination with one or more known polynucleotides, together with transgenic cells comprising such constructs.

[0018] In a related aspect, the present invention provides genetic constructs comprising, in the 5′-3′ direction, a gene promoter sequence; an open reading frame coding for at least a functional portion of a polypeptide encoded by a polynucleotide of the present invention or a variant thereof; and a gene termination sequence. The open reading frame may be orientated in either a sense or antisense direction. Genetic constructs comprising a non-coding region of a gene coding for a polynucleotide encoded by the above polynucleotides or a nucleotide sequence complementary to a non-coding region, together with a gene promoter sequence and a gene termination sequence, are also provided. Preferably, the gene promoter and termination sequences are functional in a host plant. More preferably, the gene promoter and termination sequences are those of the original polypeptide genes but others generally used in the art, such as the Cauliflower Mosaic Virus (CMV) promoter, with or without enhancers such as the Kozak sequence or Omega enhancer, and Agrobacterium tumefaciens nopalin synthase terminator may be usefully employed in the present invention. Tissue-specific promoters may be employed in order to target expression to one or more desired tissues. In a preferred embodiment, the gene promoter sequence provides for transcription in xylem. The genetic construct may further include a marker for the identification of transformed cells.

[0019] In a further aspect, transgenic plant cells comprising the genetic constructs of the present invention are provided, together with plants comprising such transgenic cells, and fruits, seeds, and progeny of such plants.

[0020] In yet another aspect, methods for modulating the polysaccharide content and composition of an organism, such as a plant, are provided, such methods including stably incorporating into the genome of the plant a genetic construct of the present invention. In a preferred embodiment, the target plant is a woody plant, preferably selected from the group consisting of eucalyptus, pine, acacia, poplar, sweetgum, teak and mahogany species, more preferably from the group consisting of pine and eucalyptus species, and most preferably from the group consisting of Eucalyptus grandis and Pinus radiata. In a related aspect, a method for producing a plant having modified cellulose content is provided, the method comprising transforming a plant cell with a genetic construct of the present invention to provide a transgenic cell and cultivating the transgenic cell under conditions conducive to regeneration and mature plant growth.

[0021] In yet a further aspect, the present invention provides methods for modifying the activity of a polypeptide in a plant, comprising stably incorporating into the genome of the plant a genetic construct of the present invention. In a preferred embodiment, the target plant is a woody plant, preferably selected from the group consisting of eucalyptus, pine, acacia, poplar, sweetgum, teak and mahogany species, more preferably from the group consisting of pine and eucalyptus species, and most preferably from the group consisting of Eucalyptus grandis and Pinus radiata.

[0022] The above-mentioned and additional features of the present invention and the manner of obtaining them will become apparent, and the invention will be best understood by reference to the following more detailed description. All references disclosed herein are hereby incorporated by reference in their entirety as if each was incorporated individually.

### BRIEF DESCRIPTION OF THE FIGURES

[0023] FIG. 1 illustrates the level of native CEL enzyme activity in positive control mung bean (V. radiata) plants.

[0024] FIG. 2 illustrates the level of CEL enzyme activity in mammalian 293T cells transfected with E. grandis CEL as compared to that in non-transfected 293T cells.

[0025] FIG. 3 shows the amino acid sequence of SEQ ID NO: 956, a cellulose synthase. The cDNA sequence encoding SEQ ID NO: 956 is provided in SEQ ID NO: 955. Eight transmembrane domains are underlined and the four conserved domains (U-1 to U-4) are boxed. A LIM-like Zn-binding domain/RING finger domain is boxed with conserved Cys residues in bold. Three conserved Asp residues are in bold and double-underlined and the conserved QXXRW motif in the U4 domain is in bold (Taylor et al., Plant Cell 12:2529-2539, 2000; Pear et al., Proc. Natl. Acad. Sci. USA 93:12637-12642, 1996; Richmond and Somerville, Plant Physiol. 124:495-498, 2000).

[0026] FIG. 4 shows the amino acid sequence of SEQ ID NO: 93, a cellulose synthase. The cDNA sequence encoding SEQ ID NO: 93 is provided in SEQ ID NO: 69. Eight transmembrane domains are underlined and the four conserved domains (U-1 to U-4) are boxed. A LIM-like Zn-binding domain/RING finger domain is boxed with conserved Cys residues in bold. Three conserved Asp residues are in bold and double-underlined and the conserved QXXRW motif in the U4 domain is in bold (Taylor et al., Plant Cell 12:2529-2539, 2000; Pear et al., Proc. Natl. Acad. Sci. USA 93:12637-12642, 1996; Richmond and Somerville, Plant Physiol. 124:495-498, 2000).

### DETAILED DESCRIPTION

[0027] As outlined above, cellulose is formed by polymerization of glucose into a linear, unbranched, polymer comprised of β-1,4 linked glucose monomers (Kawagoe and Delmer, Genetic Engineering, 19:63-87, 1997). Cellulose is the most important plant cell wall polysaccharide from both a structural, as well as industrial, perspective. Other polysaccharides are essential for healthy cell walls, as well as for many alternative industrial uses.

[0028] Glucose monomers are most commonly stored in the plant in the form of amylose by the action of several enzymes, with the rate limiting step for storage being catalysed by AGP (Iglesias et al., J. Biol. Chem. 268:1081-1086). Glucose monomers are freed from this storage polymer by the action of the enzyme AMA. The free monomers are activated by the action of the enzyme UGP, and polymerised into cellulose macro-crystalline structures by the action of the cellulose synthase enzyme complex. Pure CEL enzyme has been shown to form β-1,4 glucose linkages in vitro, but has not been shown to be sufficient for polymerization of the large polymers which are fundamental to the structure of plant cell walls. The holoenzyme complex appears to be necessary for this latter function. The holoenzyme is believed to be comprised of the CEL enzyme in combination with the SUS enzyme and ANX, the whole complex being integrated into the plasma membrane and forming a “rosette” structure as seen in electron micrographs of plant cell membranes (Arioli et al., Science 279:717-720, 1998).

[0029] Because cellulose synthesis can represent such a large sink for sugar monomers in the cell, changes in the rate of cellulose synthesis can have a profound influence on the synthesis of other plant polysaccharides. Conversely, changes in the rates of synthesis of other plant polysaccharides can have a profound influence on the pool of sugars available for synthesis of cellulose. Hence, changes in the synthesis of any single polymer may affect both the content and composition of plant cell wall polysaccharides, and polysaccharides in general.

[0030] Quantitative and qualitative modifications in plant polysaccharide content are known to be induced by external factors such as light stimulation, low calcium levels, and mechanical stress. Synthesis of cell wall polysaccharides can also be induced by infection with pathogens.

[0031] Using the methods and materials of the present invention, the polysaccharide content of a plant may be increased or reduced, by incorporating additional copies of genes encoding enzymes involved in the synthesis of cell wall polysaccharides into the genome of the target plant. Similarly, an increase or decrease in polysaccharide content may be obtained by transforming the target plant with antisense copies of such genes. In addition, the number of copies of genes encoding for different enzymes in the biosynthetic pathway of cell wall polysaccharides can be manipulated to modify the relative amount of each monosaccharide synthesized, thereby leading to the formation of cell walls having altered composition. The alteration of polysaccharide composition would be advantageous, for example, in tree processing for paper.

[0032] The polynucleotides of the present invention were isolated from forestry plant sources, namely from Eucalyptus grandis and Pinus radiata, but they may alternatively be synthesized using conventional synthesis techniques. Specifically, isolated polynucleotides of the present invention include polynucleotides comprising a sequence selected from the group consisting of sequences identified as SEQ ID NOS: 1-29, 57-80, 105, 107, 109-113, 119-128, 139-143, 149-933 and 955; complements of the sequences identified as SEQ ID NOS: 1-29, 57-80, 105, 107, 109-113, 119-128, 139-143, 149-933 and 955; reverse complements of the sequences identified as SEQ ID NOS: 1-29, 57-80, 105, 107, 109-113, 119-128, 139-143, 149-933 and 955; at least a specified number of contiguous residues (x-mers) of any of the above-mentioned polynucleotides; extended sequences corresponding to any of the above polynucleotides; antisense sequences corresponding to any of the above polynucleotides; and variants of any of the above polynucleotides, as that term is described in this specification.

[0033] In another embodiment, the present invention provides isolated polypeptides encoded by the DNA sequences of SEQ ID NOS: 1-29, 57-80, 105, 107, 109-113, 119-128, 139-143, 149-933 and 955. The amino acid sequences encoded by SEQ ID NOS: 1-22, 24-28, 57-80, 105, 107, 109-113, 119-143, 149-933 and 955 are provided in SEQ ID NOS: 30-56, 81-104, 106, 108, 114-118, 129-138, 144-148, 934-954 and 956, respectively. The present invention also encompasses polynucleotides that differ from the disclosed sequences but which, due to the degeneracy of the genetic code, encode a polypeptide which is the same as that encoded by a polynucleotide of the present invention.

[0034] The polynucleotides and polypeptides of the present invention were putatively identified by DNA and polypeptide similarity searches. In the attached Sequence Listing SEQ ID NOS: 1-29, 57-80, 105, 107, 109-113, 119-128, 139-143, 149-933 and 955 are polynucleotide sequences, and SEQ ID NOS: 30-56, 81-104, 106, 108, 114-118, 129-138, 144-148, 934-954 and 956 are polypeptide sequences. The polynucleotides and polypeptides of the present invention have demonstrated similarity to enzymes that are known to be involved in the synthesis of cell wall polysaccharides. The putative identity of each of the inventive polynucleotides and polypeptides is shown below in Table 1.

TABLE 1

| DNA | PROTEIN | |
|---|---|---|
| SEQ ID NO: | SEQ ID NO: | IDENTITY |
| 1 | 30 | AGP |
| 2 | 31 | AGP |
| 3 | 32 | AGP |
| 4 | 33 | AMA |
| 5 | 34 | AMA |
| 6 | 35 | AMA |
| 7 | 36 | CEL |
| 8 | 37 | CEL |
| 9 | 38 | CEL |
| 10 | 39 | CEL |
| 11 | 40 | CEL |
| 12 | 41 | CEL |
| 13 | 42 | CEL |
| 14 | 43 | CEL |
| 15 | 44 | SUS |
| 16 | 45 | SUS |
| 17 | 46 | SUS |
| 18 | 47 | SUS |
| 19 | 48 | SUS |
| 20 | 49 | UGP |
| 21 | 50 | UGP |
| 22 | 51 | UGP |
| 23 | — | UGP |
| 24 | 52 | ANX |
| 25 | 53 | ANX |
| 26 | 54 | ANX |
| 27 | 55 | ANX |
| 28 | 56 | ANX |
| 29 | — | ANX |
| 57 | 81 | AMA |
| 58 | 82 | AMA |
| 59 | 83 | AGP |
| 60 | 84 | AGP |
| 61 | 85 | AGP |
| 62 | 86 | AGP |
| 63 | 87 | AGP |
| 64 | 88 | AGP |
| 65 | 89 | AGP |
| 66 | 90 | CEL |
| 67 | 91 | CEL |
| 68 | 92 | CEL |
| 69 | 93 | CEL |
| 70 | 94 | CEL |
| 71 | 95 | SUS |
| 72 | 96 | SUS |
| 73 | 97 | SUS |
| 74 | 98 | SUS |
| 75 | 99 | SUS |
| 76 | 100 | SUS |
| 77 | 101 | SUS |
| 78 | 102 | SUS |
| 79 | 103 | UGP |
| 80 | 104 | UGP |
| 105 | 106 | SUS |
| 107 | 108 | CEL |
| 109 | 114 | ANX |
| 110 | 115 | ANX |
| 111 | 116 | ANX |
| 112 | 117 | ANX |
| 113 | 118 | ANX |
| 119 | 129 | CEL |
| 120 | 130 | CEL |
| 121 | 131 | CEL |
| 122 | 132 | CEL |
| 123 | 133 | CEL |
| 124 | 134 | CEL |
| 125 | 135 | CEL |
| 126 | 136 | CEL |
| 127 | 137 | CEL |
| 128 | 138 | CEL |
| 139 | 144 | SUS |
| 140 | 145 | α-amylase |
| 141, 955 | 146, 956 | CEL |
| 142 | 147 | AGP (3′ end of SEQ ID NO: 62) |
| 143 | 148 | SUS (3′ of SEQ ID NO: 74) |
| 149-185 | — | 1,3-β-D-Glucanase |
| 186 | — | 1,4-β-Cellobiohydrolase |
| 187-196 | — | α,α-trehalose phosphate synthase |
| 197-204 | — | α-glucosidase |
| 205-250 | — | aldolase |
| 251 | — | Amylopectin 6-glucanohydrolase |
| 252-262 | — | β-amylase |
| 263 | — | β-glucosidase |
| 264-272 | — | Branching enzyme |
| 273-318 | — | D-fructokinase |
| 319-354 | — | D-xylulose reductase |
| 355-365 | — | Endo-1,3-1,4-β-glucanase |
| 366-371 | — | Glucan exo-1,3-β-glucosidase |
| 372-377 | — | Glucose 6-phosphate dehydrogenase |
| 378-381 | — | Glucose phosphate isomerase |
| 382-389 | — | Isoamylase |
| 390-393 | — | L-ribulokinase |
| 394-398 | — | Mannitol-1-phosphate 5-dehydrogenase |
| 399-478 | — | Pectin methyl-esterase |
| 479-506 | — | Phosphoglucomutase |
| 507-508 | — | Phospho-ribulokinase |
| 509-521 | — | Ribulose-phosphate-3-epimerase |
| 522-530 | — | Starch phosphorylase |
| 531-551 | — | Sucrose phosphate synthase |
| 552-555 | — | SUS |
| 556-586 | — | Transketolase |
| 587-591 | — | Trehalase |
| 592-620 | — | UDP-glucose 4-epimerase |
| 621-902 | — | Xyloglucan endotransglycosylase |
| 903-908 | — | Xylose isomerase |
| 903-908 | — | Xylose isomerase |
| 909 | — | Sucrose synthase |
| 910 | — | D-fructokinase |
| 911 | — | Xylose isomerase |
| 912 | — | Cellulose synthase |
| 913-921 | 934-942 | Cellulose synthase |
| 922-927 | 943-948 | Sucrose synthase |
| 928-929 | 949-950 | Alpha amylase |
| 930-933 | 951-954 | Annexin |

[0035] The term “polynucleotide(s),” as used herein, means a single or double-stranded polymer of deoxyribonucleotide or ribonucleotide bases and includes DNA and corresponding RNA molecules, including HnRNA and mRNA molecules, both sense and anti-sense strands, and comprehends cDNA, genomic DNA and recombinant DNA, as well as wholly or partially synthesized polynucleotides. An HnRNA molecule contains introns and corresponds to a DNA molecule in a generally one-to-one manner. An mRNA molecule corresponds to an HnRNA and DNA molecule from which the introns have been excised. A polynucleotide may consist of an entire gene, or any portion thereof. Operable anti-sense polynucleotides may comprise a fragment of the corresponding polynucleotide, and the definition of “polynucleotide” therefore includes all such operable anti-sense fragments.

[0036] The term “polypeptide”, as used herein, encompasses amino acid chains of any length including full length proteins, wherein amino acid residues are linked by covalent peptide bonds. Polypeptides of the present invention may be purified natural products, or may be produced partially or wholly using recombinant techniques.

[0037] The definition of the terms “complement”, “reverse complement” and “reverse sequence”, as used herein, is best illustrated by the following example. For the sequence 5′ AGGACC 3′, the complement, reverse complement and reverse sequence are as follows:

| | |
|---|---|
| complement | 3′ TCCTGG 5′ |
| reverse complement | 3′ GGTCCT 5′ |
| reverse sequence | 5′ CCAGGA 3′. |

[0038] Preferably, sequences that are complements of a specifically recited polynucleotide sequence are complementary over the entire length of the specific polynucleotide sequence.

[0039] As used herein, the term “variant” comprehends nucleotide or amino acid sequences different from the specifically identified sequences, wherein one or more nucleotides or amino acid residues is deleted, substituted, or added. Variants may be naturally occurring allelic variants or non-naturally occurring variants. Variant sequences (polynucleotide or polypeptide) preferably exhibit at least 75%, more preferably at least 80%, more preferably yet at least 90%, more preferably at least 95% and most preferably, at least 98% identity to a sequence of the present invention. The percentage identity is determined by aligning the two sequences to be compared as described below, determining the number of identical residues in the aligned portion, dividing that number by the total number of residues in the inventive (queried) sequence, and multiplying the result by 100.

[0040] Polynucleotides and polypeptides having a specified percentage identity to a polynucleotide or polypeptide identified in herein thus share a high degree of similarity in their primary structure. In addition to a specified percentage identity to a polynucleotide of the present invention, variant polynucleotides and polypeptides preferably have additional structural and/or functional features in common with a polynucleotide of the present invention. Polynucleotides having a specified degree of identity to, or capable of hybridizing to, a polynucleotide of the present invention preferably additionally have at least one of the following features: (1) they contain an open reading frame, or partial open reading frame, encoding a polypeptide, or a functional portion of a polypeptide, having substantially the same functional properties as the polypeptide, or functional portion thereof, encoded by a polynucleotide in a recited SEQ ID NO:; or (2) they contain identifiable domains in common.

[0041] Polynucleotide or polypeptide sequences may be aligned, and percentages of identical nucleotides or amino acids in a specified region may be determined against another polynucleotide or polypeptide, using computer algorithms that are publicly available. The BLASTN and FASTA algorithms, set to the default parameters described in the documentation and distributed with the algorithm, may be used for aligning and identifying the similarity of polynucleotide sequences. The alignment and similarity of polypeptide sequences may be examined using the BLASTP algorithm. BLASTX and FASTX algorithms compare nucleotide query sequences translated in all reading frames against polypeptide sequences. The FASTA and FASTX algorithms are described in Pearson and Lipman, Proc. Natl. Acad. Sci. USA 85:2444-2448, 1988; and in Pearson, Methods in Enzymol. 183:63-98, 1990. The FASTA software package is available from the University of Virginia by contacting the Assistant Provost for Research, University of Virginia, PO Box 9025, Charlottesville, Va. 22906-9025. The BLASTN software is available from the National Center for Biotechnology Information (NCBI), National Library of Medicine, Building 38A, Room 8N805, Bethesda, Md. 20894. The BLASTN algorithm Version 2.0.11 [January 20, 2000] set to the default parameters described in the documentation and distributed with the algorithm, is preferred for use in the determination of polynucleotide variants according to the present invention. The use of the BLAST family of algorithms, including BLASTN, BLASTP and BLASTX, is described in the publication of Altschul et al., “Gapped BLAST and PSI-BLAST: a new generation of protein database search programs,” Nucleic Acids Res. 25:3389-3402, 1997.

[0042] The following running parameters are preferred for determination of alignments and similarities using BLASTN that contribute to the E values and percentage identity for polynucleotides: Unix running command with the following default parameters: blastall -p blastn -d embldb -e 10 -G O-E O-r 1 -v 30 -b 30 -i queryseq -o results; and parameters are: -p Program Name [String]; -d Database [String]; -e Expectation value (E) [Real]; -G Cost to open a gap (zero invokes default behavior) [Integer]; -E Cost to extend a gap (zero invokes default behavior) [Integer]; -r Reward for a nucleotide match (BLASTN only) [Integer]; -v Number of one-line descriptions (V) [Integer]; -b Number of alignments to show (B) [Integer]; -i Query File [File In]; -o BLAST report Output File [File Out] Optional.

[0043] The following running parameters are preferred for determination of alignments and similarities using BLASTP that contribute to the E values and percentage identity of polypeptide sequences: blastall -p blastp d swissprottrembledb -e 10 -G O-E O-v 30 -b 30 -i queryseq -o results; the parameters are: -p Program Name [String]; -d Database [String]; -e Expectation value (E) [Real]; -G Cost to open a gap (zero invokes default behavior) [Integer]; -E Cost to extend a gap (zero invokes default behavior) [Integer]; -v Number of one-line descriptions (v) [Integer]; -b Number of alignments to show (b) [Integer]; -I Query File [File In]; -o BLAST report Output File [File Out] Optional.

[0044] The “hits” to one or more database sequences by a queried sequence produced by BLASTN, BLASTP, FASTA, or a similar algorithm, align and identify similar portions of sequences. The hits are arranged in order of the degree of similarity and the length of sequence overlap. Hits to a database sequence generally represent an overlap over only a fraction of the sequence length of the queried sequence.

[0045] As noted above, the percentage identity of a polynucleotide or polypeptide sequence is determined by aligning polynucleotide and polypeptide sequences using appropriate algorithms, such as BLASTN or BLASTP, respectively, set to default parameters; identifying the number of identical nucleic or amino acids over the aligned portions; dividing the number of identical nucleic or amino acids by the total number of nucleic or amino acids of the polynucleotide or polypeptide of the present invention; and then multiplying by 100 to determine the percentage identity. By way of example, a queried polynucleotide having 220 nucleic acids has a hit to a polynucleotide sequence in the EMBL database having 520 nucleic acids over a stretch of 23 nucleotides in the alignment produced by the BLASTN algorithm using the default parameters. The 23-nucleotide hit includes 21 identical nucleotides, one gap and one different nucleotide. The percentage identity of the 1 queried polynucleotide to the hit in the EMBL database is thus 21/220 times 100, or 9.5%. The percentage identity of polypeptide sequences may be determined in a similar fashion.

[0046] The BLASTN and BLASTX algorithms also produce “Expect” values for polynucleotide and polypeptide alignments. The Expect value (E) indicates the number of hits one can “expect” to see over a certain number of contiguous sequences by chance when searching a database of a certain size. The Expect value is used as a significance threshold for determining whether the hit to a database indicates true similarity. For example, an E value of 0.1 assigned to a polynucleotide hit is interpreted as meaning that in a database of the size of the EMBL database, one might expect to see 0.1 matches over the aligned portion of the sequence with a similar score simply by chance. By this criterion, the aligned and matched portions of the sequences then have a probability of 90% of being related. For sequences having an E value of 0.01 or less over aligned and matched portions, the probability of finding a match by chance in the EMBL database is 1% or less using the BLASTN algorithm. E values for polypeptide sequences may be determined in a similar fashion using various polypeptide databases, such as the SwissProt-TrEMBLE database.

[0047] According to one embodiment, “variant” polynucleotides and polypeptides, with reference to each of the polynucleotides and polypeptides of the present invention, preferably comprise sequences having the same number or fewer nucleotides or amino acids than each of the polynucleotides or polypeptides of the present invention and producing an E value of 0.01 or less when compared to the polynucleotide or polypeptide of the present invention. That is, a variant polynucleotide or polypeptide is any sequence that has at least a 99% probability of being related to the polynucleotide or polypeptide of the present invention, measured as having an E value of 0.01 or less using the BLASTN or BLASTX algorithms set at the default parameters. According to a preferred embodiment, a variant polynucleotide is a sequence having the same number or fewer nucleic acids than a polynucleotide of the present invention that has at least a 99% probability of being related to the polynucleotide of the present invention, measured as having an E value of 0.01 or less using the BLASTN algorithm set at the default parameters. Similarly, according to a preferred embodiment, a variant polypeptide is a sequence having the same number or fewer amino acids than a polypeptide of the present invention that has at least a 99% probability of being related as the polypeptide of the present invention, measured as having an E value of 0.01 or less using the BLASTP algorithm set at the default parameters.

[0048] In an alternative embodiment, variant polynucleotides are sequences that hybridize to a polynucleotide of the present invention under stringent conditions. Stringent hybridization conditions for determining complementarity include salt conditions of less than about 1 M, more usually less than about 500 mM, and preferably less than about 200 mM. Hybridization temperatures can be as low as 5° C., but are generally greater than about 22° C., more preferably greater than about 30° C., and most preferably greater than about 37° C. Longer DNA fragments may require higher hybridization temperatures for specific hybridization. Since the stringency of hybridization may be affected by other factors such as probe composition, presence of organic solvents, and extent of base mismatching, the combination of parameters is more important than the absolute measure of any one alone. An example of “stringent conditions” is prewashing in a solution of 6×SSC, 0.2% SDS; hybridizing at 65° C., 6×SSC, 0.2% SDS overnight; followed by two washes of 30 minutes each in 1×SSC, 0.1% SDS at 65° C. and two washes of 30 minutes each in 0.2×SSC, 0.1% SDS at 65° C.

[0049] The present invention also encompasses polynucleotides that differ from the disclosed sequences but that, as a consequence of the discrepancy of the genetic code, encode a polypeptide having similar enzymatic activity as a polypeptide encoded by a polynucleotide of the present invention. Thus, polynucleotides comprising sequences that differ from the polynucleotide sequences recited in SEQ ID NOS: 1-29, 57-80, 105, 107, 109-113, 119-128, 139-143, 149-933 and 955, or complements, reverse sequences, or reverse complements of those sequences, as a result of conservative substitutions are contemplated by and encompassed within the present invention. Additionally, polynucleotides comprising sequences that differ from the polynucleotide sequences recited in SEQ ID NOS: 1-29, 57-80, 105, 107, 109-113, 119-128, 139-143, 149-933 and 955, or complements, reverse complements, or reverse sequences as a result of deletions and/or insertions totaling less than 10% of the total sequence length are also contemplated by and encompassed within the present invention. Similarly, polypeptides comprising sequences that differ from the polypeptide sequences recited in SEQ ID NOS: 30-56, 81-104, 106, 108, 114-118, 129-138, 144-148, 934-954 and 956 as a result of amino acid substitutions, insertions, and/or deletions totaling less than 10% of the total sequence length are contemplated by an encompassed within the present invention, provided the variant polypeptide has activity in a cell wall polysaccharide synthesis pathway.

[0050] Variants of the polypeptide sequences recited in SEQ ID NOS: 30-56, 81-104, 106, 108, 114-118, 129-138, 144-148, 934-954 and 956 wherein the variant has an activity level that is different to that of the recited polypeptide are also encompassed by the present invention. In specific embodiments, variants of the inventive sucrose synthase (SUS) polypeptides are provided wherein the N-terminal serine phosphorylation site has been replaced by an acidic amino acid (such as Asp or Glu) by, for example, site directed mutagenesis. Nakai et al. have demonstrated that SUS polypeptides mutated in this manner possess increased activity compared to wild-type SUS (Nakai et al., Plant Cell Physiol. 39:1337-1341, 1998). Polynucleotides encoding such variants of the inventive SUS polypeptides may therefore be employed in transgenic plants to increase cellulose production.

[0051] The polynucleotides of the present invention may be isolated from various libraries, or may be synthesized using techniques that are well known in the art. The polynucleotides may be synthesized, for example, using automated oligonucleotide synthesizers (e.g., Beckman Oligo 1000M DNA Synthesizer) to obtain polynucleotide segments of up to 50 or more nucleic acids. A plurality of such polynucleotide segments may then be ligated using standard DNA manipulation techniques that are well known in the art of molecular biology. One conventional and exemplary polynucleotide synthesis technique involves synthesis of a single stranded polynucleotide segment having, for example, 80 nucleic acids, and hybridizing that segment to a synthesized complementary 85 nucleic acid segment to produce a 5 nucleotide overhang. The next segment may then be synthesized in a similar fashion, with a 5 nucleotide overhang on the opposite strand. The “sticky” ends ensure proper ligation when the two portions are hybridized. In this way, a complete polynucleotide of the present invention may be synthesized entirely in vitro.

[0052] Certain of the polynucleotides disclosed herein are referred to as “partial” sequences, in that they do not represent the full coding portion of a gene encoding a naturally occurring polypeptide. The partial polynucleotide sequences disclosed herein may be employed to obtain the corresponding full length genes for various species and organisms by, for example, screening DNA expression libraries using hybridization probes based on the polynucleotides of the present invention, or using PCR amplification with primers based upon the polynucleotides of the present invention. In this way one can, using methods well known in the art, extend a polynucleotide of the present invention upstream and downstream of the corresponding mRNA, as well as identify the corresponding genomic DNA, including the promoter and enhancer regions, of the complete gene. The present invention thus comprehends isolated polynucleotides comprising a sequence identified in SEQ ID NOS: 1-29, 57-80, 105, 107, 109-113, 119-128, 139-143, 149-933 and 955, or a variant of one of the specified sequences that encode a functional polypeptide, including full length genes. Such extended polynucleotides may have a length of from about 50 to about 4,000 nucleic acids or base pairs, and preferably have a length of less than about 4,000 nucleic acids or base pairs, more preferably yet a length of less than about 3,000 nucleic acids or base pairs, more preferably yet a length of less than about 2,000 nucleic acids or base pairs. Under some circumstances, extended polynucleotides of the present invention may have a length of less than about 1,800 nucleic acids or base pairs, preferably less than about 1,600 nucleic acids or base pairs, more preferably less than about 1,400 nucleic acids or base pairs, more preferably yet less than about 1,200 nucleic acids or base pairs, and most preferably less than about 1,000 nucleic acids or base pairs.

[0053] The polynucleotides identified herein may contain open reading frames (“ORFs”) or partial open reading frames encoding polypeptides and functional portions of polypeptides. Partial open reading frames are encoded by SEQ ID NOS: 1-14, 16-27, 29, 57, 60-68, 70-78, 105, 107, 109-113, 119-128, 140, 142, 143, 913-933, while SEQ ID NOS: 15, 28, 58, 59, 69, 79, 80, 139, 141, 152 and 955 represent full-length sequences. Additionally, open reading frames encoding polypeptides may be identified in extended or full length sequences corresponding to the sequences disclosed herein. Open reading frames may be identified using techniques that are well known in the art. These techniques include, for example, analysis for the location of known start and stop codons, most likely reading frame identification based on codon frequencies, etc. These techniques include, for example, analysis for the location of known start and stop codons, most likely reading frame identification based on codon frequencies, etc. Suitable tools and software for ORF analysis are well known in the art and include, for example, GeneWise, available from The Sanger Center, Wellcome Trust Genome Campus, Hinxton, Cambridge, CB10 1 SA, United Kingdom; Diogenes, available from Computational Biology Centers, University of Minnesota, Academic Health Center, UMHG Box 43 Minneapolis Minn. 55455; and GRAIL, available from the Informatics Group, Oak Ridge National Laboratories, Oak Ridge, Tennessee Tenn. Once a partial open reading frame is identified, the polynucleotide may be extended in the area of the partial open reading frame using techniques that are well known in the art until the polynucleotide for the full open reading frame is identified.

[0054] Once open reading frames are identified in the polynucleotides of the present invention, the open reading frames may be isolated and/or synthesized. Expressible genetic constructs comprising the open reading frames and suitable promoters, initiators, terminators, etc., which are well known in the art, may then be constructed. Such genetic constructs may be introduced into a host cell to express the polypeptide encoded by the open reading frame. Suitable host cells may include various prokaryotic and eukaryotic cells, including plant cells, mammalian cells, bacterial cells, algae and the like.

[0055] Polynucleotides of the present invention also comprehend polynucleotides comprising at least a specified number of contiguous residues (x-mers) of any of the polynucleotides identified as SEQ ID NOS: 1-29, 57-80, 105, 107, 109-113, 119-128, 139-143, 149-933 and 955, complements, reverse sequences, and reverse complements of such sequences, and their variants. Similarly, polypeptides of the present invention comprehend polypeptides comprising at least a specified number of contiguous residues (x-mers) of any of the polypeptides identified as SEQ ID NOS: 30-56, 81-104, 106, 108, 114-118, 129-138, 144-148 and 934-954 and their variants. As used herein, the term “x-mer,” with reference to a specific value of “x,” refers to a sequence comprising at least a specified number (“x”) of contiguous residues of any of the polynucleotides identified as SEQ ID NO: 1-29, 57-80, 105, 107, 109-113, 119-128, 139-143, 149-933 and 955, or the polypeptides identified as SEQ ID NOS: 30-56, 81-104, 106, 108, 114-118, 129-138, 144-148, 934-954 and 956. According to preferred embodiments, the value of x is preferably at least 20; more preferably, at least 40; more preferably yet, at least 60; and most preferably, at least 80. Thus, polynucleotides and polypeptides of the present invention comprise a 20-mer, a 40-mer, a 60-mer, an 80-mer, a 100-mer, a 120-mer, a 150-mer, a 180-mer, a 220-mer, a 250-mer, or a 300-mer, 400-mer, 500-mer or 600-mer of a polynucleotide or polypeptide identified as SEQ ID NOS: 1-956, and variants thereof.

[0056] Polynucleotide probes and primers complementary to and/or corresponding to SEQ ID NOS: 1-29, 57-80, 105, 107, 109-113, 119-128, 139-143, 149-933 and 955, and variants of those sequences, are also comprehended by the present invention. Such oligonucleotide probes and primers are substantially complementary to the polynucleotide of interest over a certain portion of the polynucleotide. As used herein, the term “oligonucleotide” refers to a relatively short segment of a polynucleotide sequence, generally comprising between 6 and 60 nucleotides, and comprehends both probes for use in hybridization assays and primers for use in the amplification of DNA by polymerase chain reaction.

[0057] An oligonucleotide probe or primer is described as “corresponding to” a polynucleotide of the present invention, including one of the sequences set out as SEQ ID NOS: 1-29, 57-80, 105, 107, 109-113, 119-128, 139-143, 149-933 and 955, or a variant, if the oligonucleotide probe or primer, or its complement, is contained within one of the sequences set out as SEQ ID NOS: 1-29, 57-80, 105, 107, 109-113, 119-128, 139-143, 149-933 and 955, or a variant of one of the specified sequences.

[0058] Two single stranded sequences are said to be substantially complementary when the nucleotides of one strand, optimally aligned and compared, with the appropriate nucleotide insertions and/or deletions, pair with at least 80%, preferably at least 90% to 95%, and more preferably at least 98% to 100%, of the nucleotides of the other strand. Alternatively, substantial complementarity exists when a first DNA strand will selectively hybridize to a second DNA strand under stringent hybridization conditions. Stringent hybridization conditions for determining complementarity include salt conditions of less than about 1 M, more usually less than about 500 mM, and preferably less than about 200 mM. Hybridization temperatures can be as low as 5° C., but are generally greater than about 22° C., more preferably greater than about 30° C., and most preferably greater than about 37° C. Longer DNA fragments may require higher hybridization temperatures for specific hybridization. Since the stringency of hybridization may be affected by other factors such as probe composition, presence of organic solvents and extent of base mismatching, the combination of parameters is more important than the absolute measure of any one alone. The DNA from plants or samples or products containing plant material can be either genomic DNA or DNA derived by preparing cDNA from the RNA present in the sample.

[0059] In addition to DNA-DNA hybridization, DNA-RNA or RNA-RNA hybridization assays are also possible. In the first case, the mRNA from expressed genes would then be detected instead of genomic DNA or cDNA derived from mRNA of the sample. In the second case, RNA probes could be used. In addition, artificial analogs of DNA hybridizing specifically to target sequences could also be used.

[0060] In specific embodiments, the oligonucleotide probes and/or primers comprise at least about 6 contiguous residues, more preferably at least about 10 contiguous residues, and most preferably at least about 20 contiguous residues complementary to a polynucleotide sequence of the present invention. Probes and primers of the present invention may be from about 8 to 100 base pairs in length, preferably from about 10 to 50 base pairs in length, and more preferably from about 15 to 40 base pairs in length. The probes can be easily selected using procedures well known in the art, taking into account DNA-DNA hybridization stringencies, annealing and melting temperatures, potential for formation of loops, and other factors that are well known in the art. Preferred techniques for designing PCR primers are disclosed in Dieffenbach and Dyksler, PCR Primer: a laboratory manual, CSHL Press: Cold Spring Harbor, N.Y., 1 995. A software program suitable for designing probes, and e specially for designing PCR primers, is available from Premier Biosoft International, 3786 Corina Way, Palo Alto, Calif. 94303-4504.

[0061] A plurality of oligonucleotide probes or primers corresponding to a polynucleotide of the present invention may be provided in a kit form. Such kits generally comprise multiple DNA or oligonucleotide probes, each probe being specific for a polynucleotide sequence. Kits of the present invention may comprise one or more probes or primers corresponding to a polynucleotide of the present invention, including a polynucleotide sequence identified in SEQ ID NOS: 1-29, 57-80, 105, 107, 109-113, 119-128, 139-143, 149-933 and 955.

[0062] In one embodiment, the present invention provides genetic constructs that include an open reading frame coding for at least a functional portion of a polypeptide of the present invention or a variant thereof. As used herein, the “functional portion” of a polypeptide is that portion which contains the active site essential for affecting the metabolic step, i.e., the portion of the molecule that is capable of binding one or more reactants or is capable of improving or regulating the rate of reaction. The functional portion can be determined by targeted mutagenesis and screening of modified protein products with protocols well known in the art. Normally, the functional portion is 10-20 amino acids, but can be shorter or longer. The active site may be made up of separate portions present on one or more polypeptide chains and will generally exhibit high substrate specificity.

[0063] The open reading frame may be inserted in the genetic construct in a sense or antisense orientation, such that transformation of a target plant with the genetic construct will produce a change in the amount or structure of the polypeptide compared to the wild-type plant. Transformation with a genetic construct comprising an open reading frame in a sense orientation will generally result in modified expression of the selected gene, while transformation with a genetic construct comprising an open reading frame in an antisense orientation also generally results in modified expression of the selected gene. A population of plants transformed with a genetic construct comprising an open reading frame of the present invention in either a sense or antisense orientation may be screened for increased or reduced expression of the gene in question using techniques well known to those of skill in the art, and plants having the desired phenotypes may thus be isolated.

[0064] Alternatively, expression of a gene involved in the biosynthesis of polysaccharides may be inhibited by inserting a portion of an open reading frame of the present invention, in either sense or antisense orientation, in the genetic construct. Such portions need not be full-length but preferably comprise at least 25 and more preferably at least 50 residues of a polynucleotide of the present invention. A much longer portion or even the full length polynucleotide corresponding to the complete open reading frame may be employed. The portion of the open reading frame does not need to be precisely the same as the endogenous sequence, provided that there is sufficient sequence similarity to achieve inhibition of the target gene. Thus a sequence derived from one species may be used to inhibit expression of a gene in a different species.

[0065] In a second embodiment, the inventive genetic constructs comprise a polynucleotide including a non-coding region of a polynucleotide of the present invention, or a polynucleotide sequence complementary to such a non-coding region. As used herein the term “non-coding region” includes both transcribed sequences that are not translated, and non-transcribed sequences within about 2000 base pairs 5′ or 3′ of the translated sequences or open reading frames. Examples of non-coding regions that may be usefully employed in the inventive constructs include introns and 5′-non-coding leader sequences. Transformation of a target plant with such a genetic construct may lead to a reduction in the amount of polysaccharide synthesized by the plant by the process of co-suppression, in a manner similar to that discussed, for example, by Napoli et al. (Plant Cell 2:279-290, 1990) and de Carvalho Niebel et al. (Plant Cell 7:347-358, 1995).

[0066] Alternatively, regulation of polysaccharide synthesis can be achieved by inserting appropriate sequences or subsequences (e.g., DNA or RNA) in ribozyme constructs (McIntyre, Manners, Transgenic Res. 5(4):257-262, 1996). Ribozymes are synthetic RNA molecules that comprise a hybridizing region complementary to two regions, each of which comprises at least 5 contiguous nucleotides in a mRNA molecule encoded by one of the inventive polynucleotides. Ribozymes possess highly specific endonuclease activity, which autocatalytically cleaves the mRNA.

[0067] The genetic constructs of the present invention further comprise a gene promoter sequence and a gene termination sequence, operably linked to the DNA sequence to be transcribed, which control expression of the gene. The gene promoter sequence is generally positioned at the 5′ end of the DNA sequence to be transcribed, and is employed to initiate transcription of the DNA sequence. Gene promoter sequences are generally found in the 5′ non-coding region of a gene but they may exist downstream of the open reading frame, in introns (Luehrsen, Mol. Gen. Genet. 225:81-93, 1991) or in the coding region, as for example in a plant defence gene (Douglas et al., EMBO J. 10:1767-1775, 1991). When the construct includes an open reading frame in a sense orientation, the gene promoter sequence also initiates translation of the open reading frame. For DNA constructs comprising either an open reading frame in an antisense orientation or a non-coding region, the gene promoter sequence consists only of a transcription initiation site having a RNA polymerase binding site.

[0068] A variety of gene promoter sequences which may be usefully employed in the DNA constructs of the present invention are well known in the art. The gene promoter sequence, and also the gene termination sequence, may be endogenous to the target plant host or may be exogenous, provided the promoter is functional in the target host. For example, the promoter and termination sequences may be from other plant species, plant viruses, bacterial plasmids, and the like. Preferably, gene promoter and termination sequences are from the inventive sequences themselves.

[0069] Factors influencing the choice of promoter include the desired tissue specificity of the construct, and the timing of transcription and translation. For example, constitutive promoters, such as the 35S Cauliflower Mosaic Virus (CaMV 35S) promoter, will affect the activity of the enzyme in all parts of the plant. Use of a tissue specific promoter will result in production of the desired sense or antisense RNA only in the tissue of interest. With genetic constructs employing inducible gene promoter sequences, the rate of RNA polymerase binding and initiation can be modulated by external stimuli, such as light, heat, anaerobic stress, alteration in nutrient conditions and the like. Temporally regulated promoters can be employed to effect modulation of the rate of RNA polymerase binding and initiation at a specific time during development of a transformed cell. Preferably, the original promoters from the enzyme gene in question, or promoters from a specific tissue-targeted gene in the organism to be transformed, such as eucalyptus or pine are used. Other examples of gene promoters which may be usefully employed in the present invention include mannopine synthase (mas), octopine synthase (ocs), and those reviewed by Chua et al. (Science 244:174-181, 1989).

[0070] The gene termination sequence, which is located 3′ to the DNA sequence to be transcribed, may come from the same gene as the gene promoter sequence or may be from a different gene. Many gene termination sequences known in the art may be usefully employed in the present invention, such as the 3′ end of the Agrobacterium tumefaciens nopaline synthase gene. However, preferred gene terminator sequences are those from the original enzyme gene or from the target species to be transformed.

[0071] The genetic constructs of the present invention may also contain a selection marker that is effective in plant cells, to allow for the detection of transformed cells containing the inventive construct. Such markers, which are well known in the art, typically confer resistance to one or more toxins. One example of such a marker is the NPTII gene whose expression results in resistance to kanamycin or hygromycin, antibiotics which are usually toxic to plant cells at a moderate concentration (Rogers et al., in Weissbach, A and H, eds., Methods for Plant Molecular Biology, Academic Press Inc.: San Diego, Calif., 1988). Transformed cells can thus be identified by their ability to grow in media containing the antibiotic in question. Alternatively, the presence of the desired construct in transformed cells can be determined by means of other techniques well known in the art, such as Southern and Western blots.

[0072] A transcription initiation site is additionally included in the genetic construct when the sequence to be transcribed lacks such a site.

[0073] Techniques for operatively linking the components of the inventive genetic constructs are well known in the art and include the use of synthetic linkers containing one or more restriction endonuclease sites as described, for example, by Sambrook and Russell (Molecular cloning: a laboratory manual, Third Edition, CSHL Press: Cold Spring Harbor, N.Y., 2001). The genetic construct of the present invention may be linked to a vector having at least one replication system, for example E. coli, whereby after each manipulation, the resulting construct can be cloned and sequenced and the correctness of the manipulation determined.

[0074] The genetic constructs of the present invention may be used to transform a variety of plants, both monocotyledonous (e.g., grasses, corn, grains, oat, wheat and barley), dicotyledonous (e.g., Arabidopsis, tobacco, legumes, alfalfa, oaks, eucalyptus, maple), and Gymnosperms (e.g., Scots pine; see Aronen, Finnish Forest Res. Papers, Vol. 595, 1996), white spruce (Ellis et al., Biotechnology 11:84-89, 1993), and larch (Huang et al., In Vitro Cell 27:201-207, 1991). In a preferred embodiment, the inventive genetic constructs are employed to transform woody plants, herein defined as a tree or shrub whose stem lives for a number of years and increases in diameter each year by the addition of woody tissue. Preferably the target plant is selected from the group consisting of eucalyptus and pine species, most preferably from the group consisting of Eucalyptus grandis and Pinus radiata. Other species which may be usefully transformed with the genetic constructs of the present invention include, but are not limited to: pines such as Pinus banksiana, Pinus brutia, Pinus caribaea, Pinus clausa, Pinus contorta, Pinus coulteri, Pinus echinata, Pinus eldarica, Pinus ellioti, Pinus jeffreyi, Pinus lambertiana, Pinus monticola, Pinus nigra, Pinus palustrus, Pinus pinaster, Pinus ponderosa, Pinus resinosa, Pinus rigida, Pinus serotina, Pinus strobus, Pinus sylvestris, Pinus taeda, Pinus virginiana; other gymnosperms, such as Abies amabilis, Abies balsamea, Abies concolor, Abies grandis, Abies lasiocarpa, Abies magnifica, Abies procera, Chamaecyparis lawsoniona, Chamaecyparis nootkatensis, Chamaecyparis thyoides, Juniperus virginiana, Larix decidua, Larix laricina, Larix leptolepis, Larix occidentalis, Larix siberica, Libocedrus decurrens, Picea abies, Picea engelmanni, Picea glauca, Picea mariana, Picea pungens, Picea rubens, Picea sitchensis, Pseudotsuga menziesii, Sequoia gigantea, Sequoia sempervirens, Taxodium distichum, Tsuga canadensis, Tsuga heterophylla, Tsuga mertensiana, Thuja occidentalis, Thuja plicata; and Eucalypts, such as Eucalyptus alba, Eucalyptus bancroftii, Eucalyptus botyroides, Eucalyptus bridgesiana, Eucalyptus calophylla, Eucalyptus camaldulensis, Eucalyptus citriodora, Eucalyptus cladocalyx, Eucalyptus coccifera, Eucalyptus curtisii, Eucalyptus dalrympleana, Eucalyptus deglupta, Eucalyptus delagatensis, Eucalyptus diversicolor, Eucalyptus dunnii, Eucalyptus ficifolia, Eucalyptus globulus, Eucalyptus gomphocephala, Eucalyptus gunnii, Eucalyptus henryi, Eucalyptus laevopinea, Eucalyptus macarthurii, Eucalyptus macrorhyncha, Eucalyptus maculata, Eucalyptus marginata, Eucalyptus megacarpa, Eucalyptus melliodora, Eucalyptus nicholii, Eucalyptus nitens, Eucalyptus nova-anglica, Eucalyptus obliqua, Eucalyptus obtusiflora, Eucalyptus oreades, Eucalyptus pauciflora, Eucalyptus polybractea, Eucalyptus regnans, Eucalyptus resinifera, Eucalyptus robusta, Eucalyptus rudis, Eucalyptus saligna, Eucalyptus sideroxylon, Eucalyptus stuartiana, Eucalyptus tereticornis, Eucalyptus torelliana, Eucalyptus urnigera, Eucalyptus urophylla, Eucalyptus viminalis, Eucalyptus viridis, Eucalyptus wandoo and Eucalyptus youmanni; together with hybrids of the above species.

[0075] As discussed above, transformation of a plant with a genetic construct of the present invention will result in a modification in polysaccharide synthesis in the plant. For example, an increase in the production of cellulose in a plant may be obtained by introducing a genetic construct comprising an open reading frame encoding the enzyme CEL in a sense orientation. Similarly, transformation of a plant with a genetic construct comprising either an open reading frame encoding CEL in an antisense orientation or a non-coding (untranslated) region of a CEL gene will lead to a reduction in the cellulose content of the transformed plant.

[0076] Techniques for stably incorporating genetic constructs into the genome of target plants are well known in the art and include Agrobacterium tumefaciens mediated introduction, electroporation, protoplast fusion, injection into reproductive organs, injection into immature embryos, high velocity projectile introduction and the like. The choice of technique will depend upon the target plant to be transformed. For example, dicotyledonous plants and certain monocots and gymnosperms may be transformed by Agrobacterium Ti plasmid technology, as described, for example by Bevan (Nucleic Acids Res. 12:8711-8721, 1984). Targets for the introduction of the genetic constructs of the present invention include tissues, such as leaf tissue, disseminated cells, protoplasts, seeds, embryos, meristematic regions; cotyledons, hypocotyls, and the like. The preferred method for transforming eucalyptus and pine is a biolistic method using pollen (see, for example, Aronen, Finnish Forest Res. Papers, 595:53, 1996) or easily regenerable embryonic tissues.

[0077] Once the cells are transformed, cells having the inventive genetic construct incorporated in their genome may be selected by means of a marker, such as the kanamycin resistance marker discussed above. Transgenic cells may then be cultured in an appropriate medium to regenerate whole plants, using techniques well known in the art. In the case of protoplasts, the cell wall is allowed to reform under appropriate osmotic conditions. In the case of seeds or embryos, an appropriate germination or callus initiation medium is employed. For explants, an appropriate regeneration medium is used. Regeneration of plants is well established for many species. For a review of regeneration of forest trees, see Dunstan et al., “Somatic embryogenesis in woody plants,” in Thorpe TA, ed., In vitro embryogenesis of plants, (Current Plant Science and Biotechnology in Agriculture), Vol. 20, Chapter 12, pp. 471-540, 1995. Specific protocols for the regeneration of spruce are discussed by Roberts et al., (“Somatic embryogenesis of spruce,” in Redenbaugh K, ed., Synseed: applications of synthetic seed to crop improvement, Chapter 23, pp. 427-449, CRC Press: [n.p.], 1993). The resulting transformed plants may be reproduced sexually or asexually, using methods well known in the art, to give successive generations of transgenic plants.

[0078] As discussed above, the production of RNA in target plant cells can be controlled by choice of the promoter sequence, or by selecting the number of functional copies or the site of integration of the polynucleotides incorporated into the genome of the target plant host. A target plant may be transformed with more than one genetic construct of the present invention, thereby modulating the activity of more than one cell wall polysaccharide enzyme, affecting enzyme activity in more than one tissue, or affecting enzyme activity at more than one expression time. Similarly, a genetic construct may be assembled containing more than one open reading frame coding for a polypeptide encoded by a polynucleotide of the present invention or more than one non-coding region of a gene coding for such a polypeptide. The polynucleotides of the present inventive may also be employed in combination with other known sequences encoding polypeptides involved in the synthesis of cell wall polysaccharides. In this manner, it may be possible to modify a biosynthetic pathway of cell wall polysaccharides in a non-woody plant to produce a new type of woody plant.

[0079] Polynucleotides of the present invention may also be used to spacifically suppress gene expression by methods that operate post-transcriptionally to block the synthesis of products of targeted genes, such as RNA interference (RNAi), and quelling. For a review of techniques of gene suppression see Science, 288:1370-1372, 2000. Exemplary gene silencing methods are also provided in WO 99/49029 and WO 99/53050. Posttranscriptional gene silencing is brought about by a sequence-specific RNA degradation process that results in the rapid degradation of transcripts of sequence-related genes. Studies have provided evidence that double-stranded RNA may act as a mediator of sequence-specific gene silencing (see, e.g., review by Montgomery and Fire, Trends in Genetics, 14: 255-258, 1998). Gene constructs that produce transcripts with self-complementary regions are particularly efficient at gene silencing. A unique feature of this posttranscriptional gene silencing pathway is that silencing is not limited to the cells where it is initiated. The gene-silencing effects may be disseminated to other parts of an organism and even transmitted through the germ line to several generations.

[0080] The polynucleotides of the present invention may be employed to generate gene silencing constructs and or gene-specific self-complementary RNA sequences that can be delivered by conventional art-known methods to plant tissues, such as Eucalyptus and Pinus tissues. Within genetic constructs, sense and antisense sequences can be placed in regions flanking an intron sequence in proper splicing orientation with donor and acceptor splicing sites, such that intron sequences are removed during processing of the transcript and sense and antisense sequences, as well as splice junction sequences, bind together to form double-stranded RNA. Alternatively, spacer sequences of various lengths may be employed to separate self-complementary regions of sequence in the construct. During processing of the gene construct transcript, intron sequences are spliced-out, allowing sense and anti-sense sequences, as well as splice junction sequences, to bind forming double-stranded RNA. Select ribonucleases bind to and cleave the double-stranded RNA, thereby initiating the cascade of events leading to degradation of specific mRNA gene sequences, and silencing specific genes. Alternatively, rather than using a gene construct to express the self-complementary RNA sequences, the gene-specific double-stranded RNA segments are delivered to one or more targeted areas to be internalized into the cell cytoplasm to exert a gene silencing effect. Gene silencing RNA sequences comprising the polynucleotides of the present invention are useful for creating genetically modified plants with desired phenotypes as well as for characterizing genes (e.g., in high-throughput screening of sequences), and studying their functions in intact organisms.

[0081] The following examples are offered by way of illustration and not by way of limitation.

### EXAMPLE 1

[0082] Isolation and Characterization of cDNA Clones from Eucalyptus grandis and Pinus radiata

[0083] Eucalyptus grandis cDNA expression libraries (from various tissues, including flowers, leaves, phloem, roots, seeds, shoot buds and xylem), and Pinus radiata cDNA expression libraries (from various tissues, including cell cultures, fascicle meristems, phloem, pollen sacs, roots, seedlings, shoot buds, strobilus and xylem) were constructed and screened as follows.

[0084] mRNA was extracted from the plant tissue using the protocol of Chang et al. (Plant Molecular Biology Reporter 11:113-116, 1993) with minor modifications. Specifically, samples were dissolved in CPC-RNAXB (100 mM Tris-Cl, pH 8.0; 25 mM EDTA; 2.0 M NaCl; 2%CTAB; 2% PVP and 0.05% Spermidine*3HCl) and extracted with chloroform: isoamyl alcohol, 24:1. mRNA was precipitated with ethanol and the total RNA preparate was purified using a Poly(A) Quik mRNA Isolation Kit (Stratagene, La Jolla, Calif.). A cDNA expression library was constructed from the purified mRNA by reverse transcriptase synthesis followed by insertion of the resulting cDNA clones in Lambda ZAP using a ZAP Express cDNA Synthesis Kit (Stratagene), according to the manufacturer's protocol. The resulting cDNAs were packaged using a Gigapack II Packaging Extract (Stratagene) employing 1 μl of sample DNA from the 5 μl ligation mix. Mass excision of the library was done using XL1-Blue MRF′ cells and XLOLR cells (Stratagene) with ExAssist helper phage (Stratagene). The excised phagemids were diluted with NZY broth (Gibco BRL, Gaithersburg, Md.) and plated out onto LB-kanamycin agar plates containing X-gal and isopropylthio-beta-galactoside (IPTG).

[0085] Of the colonies plated and picked for DNA miniprep, 99% contained an insert suitable for sequencing. Positive colonies were cultured in NZY broth with kanamycin and cDNA was purified by means of alkaline lysis and polyethylene glycol (PEG) precipitation. Agarose gel at 1% was used to screen sequencing templates for chromosomal contamination. Dye primer sequences were prepared using a Turbo Catalyst 800 machine (Perkin Elmer/Applied Biosystems Division, Foster City, Calif.) according to the manufacturer's protocol.

[0086] DNA sequences for positive clones were obtained using a Perkin Elmer/Applied Biosystems Division Prism 377 sequencer. cDNA clones were sequenced first from the 5′ end and, in some cases, also from the 3′ end. For some clones, internal sequence was obtained using subcloned fragments. Subcloning was performed using standard procedures of restriction mapping and subcloning to pBluescript II SK+ vector.

[0087] The determined cDNA sequences are provided in SEQ ID NO: 1-29, 57-80, 105, 107, 109-113, 119-128, 139-143, 149-933 and 955. SEQ ID NO: 1, 4, 5, 8, 10, 11, 16, 17, 20, 22, 24, 25, 27, 59, 67-70, 74-77, 80, 109-113, 140, 143, 162-185, 196, 199-204, 234-251, 257-263, 265-272, 294-318, 331-365, 367-372, 378-381, 386-389, 394-398, 435-481, 504-506, 513-521, 529, 530, 548-551, 555, 574-586, 590, 591, 613-620, 772-911, 919, 920, 923, 925, 926, 928, 931, and 932 were isolated from Pinus radiata, with SEQ ID NO: 2, 3, 6, 7, 9, 12-15, 18, 19, 21, 23, 26, 28, 29, 57, 58, 60-66, 71-73, 78, 79, 105, 107, 119-128, 139, 141, 142, 149-161, 186-195, 197, 198, 205-233, 252-256, 264, 273-293, 319-330, 366, 373-377, 382-385, 390-393, 399-434, 479-503, 507-512, 522-528, 531-547, 552-554, 556-573, 587-589, 592-612, 621-771, 912, 913-918, 921, 922, 924, 927, 929, 930, 933 and 955 being isolated from Eucalyptus grandis.

### Example 2

### Polynucleotide and Amino Acid Analysis

[0088] The determined cDNA sequences described above were compared to and aligned with known sequences in the EMBL database (as updated to May 1999). Specifically, the polynucleotides identified in SEQ ID NO: 1-29, 57-80, 105, 107, 109-113, 119-128, 139-143 and 149-933 were compared to polynucleotides in the EMBL database using the BLASTN algorithm Version 2.0.6 [Sep-16-1998] set to the following running parameters: Unix running command: blastall -p blastn -d embldb -e 10-G0 -E0 -r1-v30 -b30 -i queryseq -o results. Multiple alignments of redundant sequences were used to build up reliable consensus sequences. Based on similarity to known sequences from other plant or non-plant species, the isolated polynucleotides of the present invention identified as SEQ ID NO: 1-29, 57-80, 105, 107, 109-113, 119-128, 139-143, 149-933 and 955 were identified as encoding the enzymes shown in Table 1, above.

[0089] SEQ ID NO: 152 is a corrected version (without linker) of SEQ ID NO: 141 and an extension of SEQ ID NO: 107. The amino acid sequence encoded by the open reading frame of SEQ ID NO: 152 is provided in SEQ ID NO: 146. SEQ ID NO: 955 is a corrected version of SEQ ID NO: 141, which was determined to contain a frameshift. The amino acid sequence encoded by SEQ ID NO: 955 is provided in SEQ ID NO: 956.

[0090] The cDNA sequences of SEQ ID NO: 58, 60, 62, 64, 65, 67-70, 72, 74, 75, 77, 78, 80, 105, 107, 119-121, 123-128 and 139-143 were determined to have less than 40% identity to sequences in the EMBL database using the computer algorithm BLASTN, as described above. The cDNA sequences of SEQ ID NO: 57, 59, 66, 79 and 122 were determined to have less than 60% identity to sequences in the EMBL database using BLASTN, as described above. The cDNA sequences of SEQ ID NO: 61, 71, 73 and 76 were determined to have less than 75% identity to sequences in the EMBL database using BLASTN, as described above. The cDNA sequence of SEQ ID NO: 63 was determined to have less than 90% identity to sequences in the EMBL database using BLASTN, as described above.

### Example 3

### Functional Identification of Cellulose Biosynthetic Genes

[0091] Sense constructs containing sequences including the coding regions for UGP (SEQ ID NO: 79) and SUS (SEQ ID NO: 105) from Eucalyptus grandis, and UGP (SEQ ID NO: 80) from Pinus radiata were inserted into the expression vector pET16b (Clontech Laboratories Inc, Palo Alto, Calif.). The resulting constructs were transformed into E. coli XL1-Blue (Stratagene) and induced to produce recombinant protein by the addition of IPTG. Purified proteins were obtained using Ni²⁺ column chromatography (Janknecht et al., Proc. Natl. Acad. Sci. USA, 88:8972-8976, 1991). Enzyme assays for each of the purified proteins demonstrated the expected substrate specificity and enzymatic activity for the genes tested.

[0092] Enzyme assays for UGP were performed using published methods (Peng and Chang, FEBS Lett. 329:153-158, 1993). The data shown in Table 2 demonstrates enzyme activity for the expressed proteins as compared to data from Katsube et al., Biochem. 30:8546-8551, 1991 and Nakano et al., J. Biochem. 106:528-532, 1989.

TABLE 2

| | | | | |
|---|---|---|---|---|
| SEQ ID NO: | 80 | 79 | Katsube et al. | Nakano et al. |
| Species | P. radiata | E. grandis | S. tuberosum | S. tuberosum |
| Enzyme | UGP | UGP | UGP | UGP |
| K_{M}^{G1P} | 0.121 | 0.126 | 0.130 | 0.180 |
| SEM | 0.020 | 0.002 | n.a. | n.a. |
| K_{M}^{UTP} | 0.091 | not done | 0.076 | 0.170 |
| SEM | 0.015 | not done | n.a. | n.a. |
| K_{M}^{ATP} | no activity | no activity | no activity | no activity |

[0093] Enzyme assays for SUS (sucrose synthase) were performed using the methods described by Sebkova et al. Plant Physiol., 108:75-83, 1995. The data shown in Table 3 demonstrates enzyme activity for the expressed proteins. The K_{M}^{Sucrose} of E. grandis is compared with the data reported by Delmer, J. Biol. Chem. 247:3822-3828, 1972 and Nakai et al., Biosci. Biotech. Biochem. 61:1500-1503, 1997.

TABLE 3

| | | | |
|---|---|---|---|
| SEQ ID NO: | 105 | Delmer et al. | Nakai et al. |
| Species | E. grandis | V. radiata | V. radiata |
| Enzyme | SUS | SUS | SUS |
| K_{M}^{Sucrose} | 1.651 | 16.700 | 161.000 |
| SEM | 0.371 | n.a. | n.a. |
| K_{M}^{UDP} | 0.028 | n.a. | n.a. |
| SEM | 0.003 | n.a. | n.a. |

[0094] A sense construct containing the sequence of the coding region for cellulose synthase (CEL; SEQ ID NO: 107) from Eucalyptus grandis was inserted into the protein expression vector pcDNA3 (Invitrogen, Carlsbad, Calif.). The resulting construct was transfected into mammalian 293T cells (DuBridge RB et al., Mol. Cell. Biol. 7:379-387, 1987), and recombinant protein was induced by the addition of IPTG. Proteins were solubilized from membranes, and the level of CEL activity was determined as described by Kudlicka and Brown, Plant Phys. 115:643-656, 1997. As a positive control for activity, native CEL enzyme was solubilized from mung bean (Vigna radiata) plants. The determined levels of CEL activity for V. radiata are shown in FIG. 1. The levels of CEL activity found in mammalian 293T cells transfected with the Eucalyptus CEL expression clone were found to be similar to those obtained from V. radiata (FIG. 2). CEL activity was absent in non-transfected control 293T cells.

### EXAMPLE 4

### Use of a Cellulose Synthase (CEL) Gene to Modify Polysaccharide Biosynthesis

[0095] Transformation of tobacco plants with a Pinus radiata CEL gene is performed as follows. Genetic constructs comprising sense and anti-sense constructs containing a polynucleotide including the coding region of CEL (SEQ ID NO: 8) from Pinus radiata are constructed and inserted into Agrobacterium tumefaciens by direct transformation using published methods (See, An G, Ebert PR, Mitra A, Ha SB, “Binary Vectors,” in Gelvin SB and Schilperoort R A, eds., Plant Molecular Biology Manual, Kluwer Academic Publishers: Dordrecht, 1988). The constructs of sense polynucleotides are made by cloning PBK-CMV plasmid cDNA inserts into pART7 plasmids, followed by cloning of the NotI-digested 35S-Insert-OCS 3′UTR-fragments from the pART7 vectors into pART27 plant expression vectors (See Gleave A, “A versatile binary vector system with a T-DNA organizational structure conducive to efficient integration of cloned DNA into the plant genome,” Plant Molecular Biology 20:1203-1207, 1992). The presence and integrity of the transgenic constructs are verified by restriction digestion and DNA sequencing.

[0096] Tobacco (Nicotiana tabacum cv. Samsun) leaf sections are transformed with the sense and anti-sense CEL constructs using the method of Horsch et al., Science 227:1229-1231, 1985. Transformed plants containing the appropriate CEL construct are verified using Southern blot experiments. Expression of Pinus CEL in transformed plants is confirmed by isolating total RNA from each independent transformed plant line created with the CEL sense and anti-sense constructs. The RNA samples are analysed in Northern blot experiments to determine the level of expression of the transgene in each transformed line.

[0097] The total activity of CEL enzyme, encoded by the Pinus CEL gene and by the endogenous tobacco CEL gene, is analysed for each transformed plant line created with the CEL sense and anti-sense constructs. Crude protein extracts are prepared from each transformed plant and assayed using the methods of Robertson et al., Biochem J. 306:745-750, 1995 and Pear et al., Proc. Natl. Acad. Sci. USA 93:12637-12642, 1996.

[0098] The concentration of cellulose in the transformed tobacco plants is determined using the method of Smith and Harris, Plant Phys. 107:1399-1409, 1995. Briefly, whole tobacco plants, of an average age of 38 days, are frozen in liquid nitrogen and ground to a fine powder in a mortar and pestle. The cellulose content of 100 mg of frozen powder from an empty vector-transformed control plant line, at least one independent transformed plant line containing the sense construct for CEL and at least one independent transformed plant lines containing the anti-sense construct for CEL are determined using a glucan estimation kit from Megazyme (Warriewood, New South Wales, Australia) using the protocols supplied by the manufacturer.

[0099] SEQ ID NOS: 1-956 are set out in the attached Sequence Listing. The codes for nucleotide and amino acid sequences used in the attached Sequence Listing, including the symbols “n” and “Xaa”, conform to WIPO Standard ST.25 (1998), Appendix 2, Table 1.

[0100] Although the present invention has been described in some detail by way of illustration and example for purposes of clarity of understanding, changes and modifications can be carried out without departing from the scope of the invention which is intended to be limited only by the scope of the claims.

The application's sequence listing, which the Patent Office published only in electronic form, follows.

SEQUENCE LISTING (956 sequences)

SEQ ID NO: 1 - DNA, 455 bp, Pinus radiata
aatttcggggaattcaatacagacgaaatggctggcgttatggccgcagagttgcaaatttgaacgttctgggccgagaaactgccgagttcacttcgttcaggccggtatttcttcgaggaaattctcagggactctcttcggcctcttctttgtgtgattacagaattttcgcggattccaagcggaagaagcatgcgattttcaggaagcagaatattaatagaagcacagtcgtttctccacgggcggtttctgatactttcagtgaactgacctgtttagatccggtcgcgagtcggagtgtgctgggcattatcctaggaggtggagctgggactcgtctttatccactgactaagaagagagccaaaccagctgttcctttgggtgccaattataggctgatcgatatccctgttagtaattgcataaatagtaatatctctaagatc

SEQ ID NO: 2 - DNA, 218 bp, Eucalyptus grandis
gggccccagctctcgcctccggcgcggctgccttcaagagcgtgcggagagctccggccgtcgtgtctcccagagccgtctccgattcccggaactcgcagacgtgccttgaccccgacgccagccgcagtgttctcggaattatactaggaggtggggccgggacccgtctttaccccctgactaagaagagagcaaaacccgccgtcccgttggga

SEQ ID NO: 3 - DNA, 737 bp, Eucalyptus grandis
gttaaaggatgcaataatttcccacggttgctttttgagagagtgccgcgttgaacgctccatagtgggtgaacgctcgcgcctcgattctggagttgagctgaaggacacggtgatgatgggtgcagactattaccaaacagaatctgaaatagcttctctgttagcggaggggaaggtgcctattgggatagggaagaacacaaagataaggaactgcataattgacaagaacgcgaagattgggaaagatgtggccattgtaaacaaagatggcgttgaagaagcagatcggccaggggatgggttttacatacgcttgggaataaccgtgatactggagaaggcaaccatagaagatggtacagttatataagcggatggattttgagtcgatcaacagttgtttccaaggtgaaaaaaatactccgagaagagacctagcatggagatcgaacaagttatacagagttttcaagcagttctcgtgctggagagttgctgatctcctttctgctgtatgtacaaaaaaacttatccctagtcctctccatagtattagaggacaagcttactagagtctgagttcccacaatataagtacttctgagtttgtaaaaaaggtaatctgcgagatatgaataaactttgccggttgtatcgaactttcgatactatcccggtgatgatgtcttgtgaaactgatgggctgttgtttaagtaaaaaaaaaaaaaaa

SEQ ID NO: 4 - DNA, 202 bp, Pinus radiata
gatacgaattgtccttcagggttttaactgggaatctcatcgctctggaggatggtatcataagctttctgggaaagcagctgaaatagcctcaaagggattcacgattgtttggcttccaccacccactgattctgtctctccagaaggttacatgccacgtgacttgtatgatctgaattcaagatatggaagtctggaa

SEQ ID NO: 5 - DNA, 472 bp, Pinus radiata
aatcaagatgctcatcgtcaacggattgttaattggattaatgctacaggaggatcttcatcagcatttgatgtcaccactaagggaattctgcatgtggcattgcacaatcaatattggaggttgattgatcctcagggaaagccaactggtgtaatgggatggtggccctcccgagcagtaacctacttggaaaatcatgatacaggctcaacacagggacattggccatttcctcgtgataagcttacacaaggatatgcatatattctcacacacccaggaactcctacaattttctatgatcatttctatgattttggtctgcatgataccataacagagctgattgatgctcgcacccgtgcgggaatccattgccgtagtactttgaaaattttccatgctaacaatgaaggctatgctgcccaaattgatgaaaatttggtcatgaagttgggacaatttgact

SEQ ID NO: 6 - DNA, 997 bp, Eucalyptus grandis
acctactgattctgtgtcacctgaagggtatatgccgagggatctttacaatttaaattcaagatatggaactattgatgaactgaaggatctcgtgaagaagttccatgaagttaacataagagttcttggagatgttgtgcttaatcatcgatgtgcacaataccagaatcaaaacggtatatggaatatttttggtggtcgtctaaattgggatgatcgagctgtagttgctgacgatcctcattttcagggtagaggcaacaagagtagtggagataattttcatgctgccccaaatattgatcactcacaagattttgtgcggaaagatctgaaggaatggttacattggctgaggagtgaaattgggtatgatggatggaggctcgattttgttagaggcttttggggtggctatgtcaaagactacttggatgctagtgaaccttactttgccgttggtgagtactgggattccctcagctatacatatggagaaatggatcacaatcaagatgcacacaggcagagaattatcgactggataaacgctacaaatggcacagctggagcatttgatgtcaccacaaaaggaattcttcatgccgcattggaaagatgtgaatattggcgactatcagatcagaagggaaaacctccaggggttgtcggatggtggccatctcgagctgtaacatttgtagagaaccatgacactggctctacccagggtcattggagatttccaagtggaaaggaaatgcaaggatatgcctatatcttgacgcacccaggaactccagcagtgttctatgaccacatcttttctcactaccaatctgaaattggttcacttatctctatcaggaatcgcaacaagatccattgcaggagcactattaaaataaccaaggctgagagggacgtctatgcagccattattgatgacaaagttgcaatgaagattggaccaggctactatgaaccccaaagt

SEQ ID NO: 7 - DNA, 856 bp, Eucalyptus grandis
ctcttctcgtctcgctttctcatataaagaagtgaaagaatacgaggatactccacttgggtatcgccaagaactcattgggtcgcgagaagattggccaacatgatggaatccggggttcccctgtgcaacacttgcggagaggctgttggggttgatgagaaaggcgaggtcttcgtggcttgtcaagagtgcaacttcgccatttgcaaggcttgtgtcgaatatgagattaaggaaggaagaaaagcgtgcttgcgctgtggcactccatttgaagcgaactcgatggctgatgctgagagaaatgaattgggaagtcgatcgacaatggcagctcaactcaatgatcctcaggacacagggattcatgctagacacatcagcagtgtttctacgttggatagtgaatacaatgatgagactgggaaccctatctggaagaatagagtggagagctggaaggacaaaaagaataagaagaagaaggccccgacgaaggctgagaaagaggctcaagttccaccagagcagcagatggaagagaagcaaattgctgatgcttcagagccactctcgaccgttattcccattgccaaaagcaaactcgcaccataccgaaccgtaataataatgcgattgatcattttggcacttttcttccattaccgagtgacacatccagtcgacagcgcctatccattgtggcttacatccatcatatgtgagatttggttcgcatactcatgggtgttggatcagttcccgaagtggtctcccgtgaataggattactcatgttgacagactgtctgcaaggtatgaaaaagaaggtgaaccttcagagcttgctgtgc

SEQ ID NO: 8 - DNA, 383 bp, Pinus radiata
cttcctcgccttgtctatgtttctcgtgaaaagagacctggatatcagcaccacaagaaagccggtgccatgaacgccctggttcgagtctctgcagttctaacaaatgccccattcattttgaacctggattgtgatcactatctcaacaacagtaaggccgtgcgggaggcaatgtgttttctcatggatccccaacttggaaagaaactgtgctatgttcagttccctcagagattcgatggtattgatcgccatgatcgatatgcaaacagaaacactgttttcttcgatatcaacatgaagggtctagatggcatccaggggccagtgtatgtggggactggatgcgttttcaacaggcaagctctgtatgggtatga

SEQ ID NO: 9 - DNA, 1860 bp, Eucalyptus grandis
ccactacatcaacaacagtaaggctatcagggaagctatgtgttttctaatggatccccaacttggaaagaagctttgctatgttcaatttcctcagaggttcgatggcattgatcgacatgacagatatgctaataggaacatagttttctttgatatcaacatgagagggcttgatgggatacaaggaccagtgtatgttggaactggatgtgtgttcaatcggcaggcattgtatgggtatgatcctccagtgtcccaaaagcggccaaagatgacatgtgattgctggccttcatggtgctcttgttgctgcggtggttcaaggaagtcaaagtcaaagaagaaggatgatacgagtttgcttgggcctgttcatgcgaagaagaaaaagatgacaggaaagaactacttgaagaagaaagggtctggacctgtctttgatctagaagacattgaagaaggacttgagggttttgatgagctagaaaaatcatcgctcatgtctcagaagaattttgagaagcggtttggacagtcacctgtattcattgcctccacactaatggaagatggtggcttgccagaagggactaactccacttcacttattaaggaagctatccatgtcataagttgtggctatgaagagaaaacagaatggggcaaagagattggatggatttatggctccgttacagaagatatcttgacaggcttcaagatgcattgtagaggatggaagtctgtatattgcatgcccaaaagaccagctttcaagggatcagcacctataaatctgtcagatcgactccatcaagttctgagatgggctcttggctccgttgagattttcctcagtcgtcattgtcctttgtggtatgcttggggaggaaaactcaaactgcttgagaggcttgcctatatcaacaccattgtctaccctttcacttccattcctttgcttttctactgtacaatacctgccgtttgccttctcactgggaaattcattatccccacgctcactaactttgcgagcatatggttcttggcccttttcctatccatcatagccactggcgtgcttgaactacggtggagtggtgtcagcatcgaggactggtggcgtaatgaacaattctgggtcattggtggcgtatctgcacacctcttcgctgtattccaaggcctcctcaaggtgcttgccggagttgatactaacttcactgttacagcaaaggcagccgaggacagtgagtttggtgaactctaccttttcaagtggactaccctgctcataccaccaaccactctaataatcttgaacatggtcggtgtcgtcgccggtgtttcggatgccataaacaatggatacggatcgtggggccctctgttcgggaagctcttcttcgccttttgggtgatcgtccatctctaccctttcctcaaaggtctgatgggaaaacagaacaggacacccacgatcgtggtcctttggtccgtacttctcgcctctattttctcattggtctgggtccggatcgatccgttcctgcccaagcaaaccggtccagttctcaaaccgtgtggggtggagtgctgattctggcgtcggatttcattcaacacgccgtctctccgacccgattagatgtgtcgctttacggagctgtttctttctgtctcttacttgggacatattgtaatgcactaggggaaatcttcccgattgaaatctcttgattagcataggttttgcttgaagagtgtggaactgaaatgtgcaaagtcctggttttgaactttttgcaatatattctgctcaagattaagcaaaaaaaaaaaaaaaaaaaaaaa

SEQ ID NO: 10 - DNA, 400 bp, Pinus radiata
ctggcactatttctcacttggcgagtcaagaaccctaataccgacgcatattggttatggggcatgtctattgtatgtgaattatggtttgctttctcatggctactggatcagttgccaaaattgtgtcctattaatcgctccactgatcttgctgttctcaaggacaagtttgagtcaccaactggcgacaatccagcagggagatcagacttgcctggtatcgattgttttgtctccactgctgatccagagaaagagccaccactggtcactgcaaacacaatcctgtcaatcctttctgctgattacccagtggagaagcttgcctgctatgtgtcagatgatggaggagctcttctcacatttgaagccatggcagaagctgcaagctttgcag

SEQ ID NO: 11 - DNA, 619 bp, Pinus radiata
gcttttagtctctcagagaagctttgagaagtcgtttggccagtcctcggtgttcattgcgtcaactctcatggacaatggtggtgttccagagtcgaccaatccagcttcactcatcaaagaagctatacatgtgatcagctgtggctacgaagagaaaaccgaatgggggaaagaggtcggatggatctatggttctgtgacagaagacattctaacaggtttcaagatgcactgccgaggatggcgctccatttactgcatgcccaagagaccagcattcaaggggtctgctcctatcaatctatcagatcgtctgcaccaagttcttcgttgggcattgggttctattgaaatcttattcagcaggcactgcccgttgtggtatggatttggagcaggccgtctcaagtggctggaaagactggcctacactaacaccatcgtctatcccctcacgtctcttcctctgattgcctactgtactcttcctgccatatgtcttctcacgggagaattcattattcctacgctgagtaatcttgcaagcatctatttcatgctcctcttcatctccattatcgtgacgggcgttctggaactgagatggagtggagtg

SEQ ID NO: 12 - DNA, 719 bp, Eucalyptus grandis
cttgctttgagacatgatcgtgaaggggagccttcacagttggctcctgttgatgtctttgtgagtactgtggatcctttgaaagaacctcctctcataacagcgaacactgtcttatccatacttgccgtggattaccccgtcgacaaagtgtcgtgttatgtctctgatgatgggtctgcgatgttgacttttgaagccctctctgaaactgctgagtttgcaaggaagtgggtgcccttctgcaaaaagcacaacattgagccacgagctcctgaattctactttgcccagaaaatagattacttgaaggacaagatacagccttcttttgtaaaagaacgcagggcaatgaagagagaatatgaggagttcaaggtgcgaatcaatgctttggttgcaaaggcacaaaagatgccagaagaagggtggacaatgcaggatggcactgcctggcctggaaataaccccagggatcaccctggaatgatacaggttttcctgggccacagtgggggacttgatactgatggaaatgagctacctcgacttgtttatgtttctcgtgaaaagcgacctggtttccaacatcacaagaaagctggagccatgaatgctttgatccgggtctcggctgtcctaaccaatggagcgtatcttttgaatgttgactgtgatcattactttaataatagtaaagcattgaaagaagcaatgtg

SEQ ID NO: 13 - DNA, 759 bp, Eucalyptus grandis
attagctgtggctatgaggacaagactgaatggggcaaagagatcggatggatatatggttctgttacagaagatattttgactggatttaagatgcatgctcggggctggatttcaatctattgtatgcctcctcgcccagcattcaaggggtctgctcccatcaatctttctgatcgtttaaaccaggttctcaggtgggccttggggtcaattgagattttgctaagcaggcattgtcctatatggtatggatataatgggaaattgaggctcttggagagattggcgtacatcaatacaattgtgtatcccctcacctcaataccgctgattgcgtattgtattctccctgcattttgtcttctcactaacaaatttattatacctgagataagcaactttgctagcatgtggttcattctccttttcgtctcaattttcacgactggtattcttgagctccgttggagtggtgtcagcattgaggattggtggaggaatgagcagttctgggtcattggtggtacatccgctcaccttttcgctgtgttccaagggcttcttaaagtgcttgctggcattgataccaacttcacagtcacttcgaaagcaggcgatgaggatggagactttgctgagctttatgtgttcaaatggacatcgcttctcattcctccgaccacagttcttatcgtgaacatcattggcattgtagcaggtgtgtcttatgcgattaacagcgggtatcagtcatgg

SEQ ID NO: 14 - DNA, 1407 bp, Eucalyptus grandis
cagtgcttttccatccttgctgtggactatcctgttgataaagtctcttgttatctttctgatgatggtgctgcgatgctctcattcgagtctcttgttgaaacggccgactttgcaagaaagtgggtacctttctgcaaaaagtattcgattgagccccgtgcgcctgagttctacttttctcagaagattgactacttgaaggataaaattcagccttcttttgtgaaggaacgaagagcaatgaaaagagactatgaggagttcaaagttcgagttaatgctttggtagcaaaagcgcagaaagcgccggaggaaggttggtctatgcaggatgggacaccttggcctggaaataactctcgtgaccaccctggaatgattcaggttttcctcggaagtagtggagcccacgacatcgagggaaatgaacttcctcggctggtgtatgtttccagagagaagagacccggtttccaacatcataaaaaggccggagcggaaaatgctctggtgagagtatctgcaattctgacaaatgctccgtacatcctcaaccttgactgcgatcattatgtcaactatagtaatgctgttcgtgaagcaatgtgcttcctgatggatcctcaagttggtagaaatttgtgctatgtgcagttccctcagagatttgatggtatcgatcgcagtgatcgatatgccaaccgaaataccgttttctttgatgttaacatgaaagggctggatggaatccaaggaccagtttatgtcgggacaggatgtgttttcaataggcaagcactttacggatacggacccccttctatgccgaatttaccaaagccctcctcatcatgctcctggtgtggctgctgctcttgttgctgcccttcaaagaagcccactaaagatctctcagaagtttaccgagactcaaaaagggaagacctaaatgccgccatcttcaaccttggagagatcgacaattatgatgagcatgagagatcaatgctgatctctcagatgagctttgagaaaacttttggcttgtccactgtgtttattgagtcgacgctgttggcaaatggaggagttcctgaatctgcccatccgtctatgctgatcaaagaagccattcatgtcattagctgtggctatgaagagaagaccgcatggggcaaagagatcggttggatatatggctcggttactgaggatatcttaacagggttcaagatgcactgcagaggatggaggtcggtctattgcatgcccttaaggcctgcattcaagggatcagcgcccattaatttgtcagacagactgcaccaagttctccgatgggctctgggttccgtggaaatattcttgagtagacattgtccactttggtatggatttggcgga

SEQ ID NO: 15 - DNA, 2913 bp, Eucalyptus grandis
gccagaagggggaggccgagcctcttgctttttttcgtgtataaaagggcctcccccattcctcatttttcaccatcctccgttcgttcgttcccttccctttccattgttgcgtttaagccctccaattttcttttggcgtcccgtttttggggctcccttgaagatctcctcttcatttcgggatttcctgccttcgccgcgccatttgaagttctttttctgagagaagaatttagacatggctgatcgcatgttgactcgaagccacagccttcgcgagcgtttggacgagaccctctctgctcaccgcaacgatattgtggccttcctttcaagggttgaagccaagggcaaaggcatcttgcagcgccaccagatttttgctgagtttgaggccatctctgaggagagcagagcaaagcttcttgatggggcctttggtgaagtcctcaaatccactcaggaagcgattgtgtcgcctccatgggttgctcttgctgttcgtccaaggccgggcgtgtgggagcacatccgtgtgaacgtccatgcgcttgttcttgagcaattggaggttgctgagtatctgcacttcaaagaagagcttgctgatggaagcttgaatggtaactttgtgcttgagcttgactttgagccattcactgcctcttttccgcgcccgactctttccaagtctattggcaatggcgtcgagtttctcaatcgccatctctccgctaagctcttccatgacaaggaaagcttgcaccctctgcttgaattcctccaagtccactgctacaaggggaagaacatgatggtgaatgccagaatccagaatgtgttctccctccaacatgtcctgaggaaggcggaggagtatctgacctcgctcaaacccgagaccccgtactcccagttcgagcacaagttccaggagatcgggctcgagcgggggtggggtgacacggctgagcgcgtcctcgagatgatccagctcctgttggatctccttgaggctcccgacccgtgcactctcgagaagttcttggatagggttcccatggtcttcaacgtcgtgatcatgtctccccacggatactttgctcaggacgacgtccttggttatccggataccggtggccaggttgtttacatcctggatcaagttcgtgccctagaggaagaaatgcttcaccgcattaagcaacaaggactggatattactcctcggattctcattatcactcggcttcttccagacgcggttggaaccacctgtggccagcgccttgagaaagtttttgggaccgagtactcccacattcttcgcgtccccttcagaaatgagaagggagtcgtccgcaagtggatttcccggttcgaggtgtggccctatttggaaagatacactgaggatgtcgcgagcgaacttgctggagagttgcagggcaagcctgatctgatcatcggaaactacagtgatggaaacattgttgcttccttgttagcacataaattaggtgttacacagtgtacaatagcccatgccctcgagaagacgaagtacccagagtcagacatatactggaagaaatttgaggaaaagtaccacttctcttgccagttcactgctgatctcatcgccatgaaccacaccgacttcattatcaccagcaccttccaagaaattgctggaagcaaggatacagtggggcagtatgagagtcacatgaacttcactcttcctggactctaccgagttgtccacgggatcgacgtcttcgacccgaagttcaacattgtttcaccaggtgctgacatgagcatctactttgcttacaccgaacaggagcggcggttgaaatccttccaccctgagatcgaggaactcctcttcagcgatgttgagaacaaggaacacttgtgtgtgttgaaagataagaagaagcctattattttcaccatggcaaggctggaccgtgtcaagaacttgacagggcttgttgagtggtatggcaagaactccaagttgagggaactcgccaacttggtcgtggttggaggtgacaggaggaaggattcgaaggacttggaagagcagtctgagatgaagaaaatgtacgacctcatcgaaaagtacaagctgaatggccagttcaggtggatttcctcccagatgaaccgggtgaggaatggagagctctaccgctacatctgtgacacgaagggagtcttcgttcaaccggctatctatgaagctttcgggttgaccgtggttgaggccatgacttgtggattgccaacctttgccacttgcaatggtggaccagctgagatcattgtgcatggcaaatcgggctaccacattgatccttaccatggtgaccaggcggccgagcttcttgtagacttcttcaacaagtgcaagattgaccagtcccactgggacgagatctcaaagggtgccatgcagagaattgaagagaagtatacatggaaaatatattctgagaggctgttgaacctgactgccgtgtatggcttctggaagcatgtgactaaccttgatcggcgcgagagtcgccggtaccttgaaatgttctatgccctcaagtatcgcccactggcacagtctgttcctccggctgtcgagtaaacaaagagacagattgttaccagaagacggaagcattggacttttgaagttttcaaggaataaacattggaaattgtttgaatttgggattgccaagagcgatctttttcgtttcctttttttggtcctttttctcttctttgtttccattccgcgaatgtttgcattttggggtttgtacccatcaattcagtaaatggttcattttcttttcaaattgtcaatcccactccgtatttcgtaaaaaaaaaaaa

SEQ ID NO: 16 - DNA, 401 bp, Pinus radiata
ataaaacaacaagggttggacattacacctcagattattgtggtgactaggttgattcctgaggcccacggtacaacatgcaatcaacgaattgaaaaagttagcggaacacaacattcgctaatactccgggtgcccttcagaacagaaaaaggagttttgcgtaactgggtttctcgatttgatgtgtggccttacttggaaagattttcagaggatgtaacaaatgaagtaactgcggagctaaaaggacaacctgatctgattattggaaattacagtgatggaaatttagtcgcatctttgattgcgcataaacaaggaatcacacagtgcaacatagcccatgccttggagaagaccaaatacccagattcagacatatattggaaaaattttga

SEQ ID NO: 17 - DNA, 477 bp, Pinus radiata
acatggaattgatgtttttgatcccaagttcaacattgtttctcctggagcagacatgcagatttatttcccttatacagaaaagcagcatcgccttactactttacatggtacaattgaggaactcttgttcagtcccgaacagacagctgaacatatgtgtgctttgaatgaccgtaaaaagcccattatcttttctatggcaagactcgaccgggttaaaaatatgacaggattggtggaatggtttgcaaagagcaaacgcttgagggagctggttaaccttgtcgtggttgctggtgatattgacccatcaaagtccaaagacagagaagaagtggccgaaattgaaaaaatgcatagactagttaaagagtataacctgaatggtcagttcagatggatatgtgcacaaaagaatagagtgcggaatggtgagctttaccgctacatctgtgacaccaggggtgcctttgt

SEQ ID NO: 18 - DNA, 503 bp, Eucalyptus grandis
aaacttctaaagcacggcgggtttcactttggtggttcgtgcagttttgttacgagagaaggattaagccatggcggatcgtgtgctgaaccgaagtcacagccctcgcgagcgtttggacgaggccctctttgctgaccgcaacgattgtctggtcttcctgtcaaggcttaaagccaagggcaaaggcatcttgcagcgccaccaaatacttgctgtgtttgaggcgatccccgaggagagcagagcaaggcttcttgatggggcttttggtaaagtcctcaaatccactcaggaagcgattgtctcgtctccatgggttgctcttgctgttcgtgcaaggccaggtgtgtgggaacacatccgtgtgaacgtccatgcgcttcttcttgagcacttccaggttgatgagtatctgcacttcaaagaagcgcttgttgatggaagcttgaatcctgattctgagccacttactgccacttttgggcggcgacccttccacg

SEQ ID NO: 19 - DNA, 413 bp, Eucalyptus grandis
atcaaaatgggcacgatggtcctcaaaattacaaaatctcggatctgtctgtgtcttgcttgcttcgttaataaataaatatagcatcactaggaacctgtccagtaccacgtctcactctaatcagtgagtttcaatacactcaggaagcgattgtgtcgcctccatgggttgctcttgctgttcgtccaaggccgggcgtgtgggagcacatccgtgtgaacgtccatgcgcttgttcttgagcaattggaggttgctgagtatctgcacttcaaagaagagcttgctgatggaagcttgaatggtaactttgtgcttgagcttgactttgagccattcactgcctcttttccgcgcccgactctttccaagtctattggcaatggcgtcgagtttcgcaatcgccatctc

SEQ ID NO: 20 - DNA, 1108 bp, Pinus radiata
gtgatctcggcgccactggttttgggtgagacatcttggtttccagagcccggcggtggacatccgaaattttcgtgactgcacatcttcttcgcataattcgccggaatatactctcattgctccgctccaactaaacataaagggaggtggaggaggaggtggtggcaacactacgattgatcggctgagaggatttatatgataattcttcgctattcaacatagcgttaacaggaagcataagtgcgtaacagtttcgtcttctacgcacgctctgatctgtccgcgacggggatatttctatcacgaccgaaaatggctgcagcaccagcagttgcttcacccgcagccgaaactgatcggatccctaaacttcaagccgaggtcacgaagctgaaccagatcagtgataatgagaaggaagggtttgtgcgactggtttctcgctacctcagcggcgaagaagagaagattgaatgggaaaaaatcaagaccccgactgacgagatcgtggttccctacgatacgttggcagctttgggagaagatccatcggaaaccaaggaactcttggacaagcttgttgtgttaaagcttaatggcggtttgggaacaaccatgggttgtactgggcccaaatccgtcattgaagtacgaaatggcctaacatttctggacttgattgtgaagcaaatagagtctctgaacaacaaatacgattccaaagttccgttggtgctgatgaattcatttaatacacatgatgatacaattaagattgtagaaaagtactctggctcaaatattgacatccacatcttcaaccagagtcaatatccacgcatggtggcagaagatttgacaccatggccaactaaaggtcgtacagacaaagaagcatggtacccacctggccacggagatgttttccccgctcttttgaacagtgggaagcttgatgaactactctcacagggtaaggagtacgtgttcatagctaactcagacaacttgggagcaatagttgatctcagtatcctatttgcacttgtgttttaacgtatttgttattatctcaaagtttaaacttaaaattgtgtatagc

SEQ ID NO: 21 - DNA, 559 bp, Eucalyptus grandis
cggccgagattggttacacttgttattctcccccccgtcgctagccggccacttttatatcctcctcccgtttcgtactcttcactcatctccctccccaaaagcccaatcgaatctcgctcctccttttttttatcttccacatcaccaccttcctcctcctcctcctcctcctcagcgttctctccacgttcatctccatcgctgtctccctctcagatccggagctcttcttcgctagcccgccaatggctgccgctgccaccctgagcgcccccgacgctgcgaagctctctcagctcaaatcggccgtctccggcctcggccaaatcagcgagagtgagaagaatggattcatcaacctcgtgtctcgctatctcagtggcgaagctcaacatgttgactggagcaagatccagacgcccactgacgaaattgtcgtcccttacgatagcttggcgcccactccccaggatcctgcagcgaccaagagccttttggacaaactcgttgtgctgaagctcaatggtggtttgggaactacgatgggttgtactgg

SEQ ID NO: 22 - DNA, 1036 bp, Pinus radiata
gctaactcagacaacttgggagcaatagttgatctcaaaattttgaatcatctggtcaaaaataaaaatgaatactgcatggaggtcactcccaaaacgcttgcagatgtaaaaggtggtacacttatctcttatgaaggcagagttcagcttctagagattgcacaggttccagaggagcatgttggcgaattcaagtcgattgaaaagttcaaaatcttcaataccaataatttatgggtgaacttgaaggcgattaagaggcttgtggaggctgatgctcttaaaatggagataattcctaatccaaaggaagtggatggggtaaaggtgcttcagcttgaaacggctgcaggtgctgctataaggttttttgatcgtgcaattggtgtcaatgttccaagatcacgctttctcccagtgaaggcaacttcagatttactacttgtgcagtcggatctttacactgtggaggaaggttttgtcatccgaaatcctgctagagtcaaccctacaaatcccaccattgagttgggtcctgaattcaagaaggttggcaactttctaaagcgtttcaagtccatacctagcatcattgatcttgatagtctaaaggtgtcaggtgatgtgtggtttggcagtggagtcatcctgaagggaaaagttataattgaagcaaagcagggggctacacttgagatacctgatgaatctgtgatagaaaacaaggtagtgagcagtcctgatgatattgtgaactagcttataagttttggcagttggcattcttgatttttgggttgtttgtagagctagaatactgtgtttagtgcccttaaagagtagggtggaagtttcacctctggttttatcttccataatccttactgggaggggtttcataattttattataactagccagtttctatgtaaatgttgagcgcgaatttttatgcatgaaagcctaggatgaagcatccaaacacaataaataaatggtgctttgttgagatttttttgaaaaaaaaaaaaaa

SEQ ID NO: 23 - DNA, 467 bp, Eucalyptus grandis
gtcacctttcccttgagagtaatgccagtgccaaaccatacatcaccagacaccttcaggctatcaagctcaataatgctgggaattgacttgaatctgctcaagaaattgccaaccttcttaaactcagggcccaattcgattgaaggatttgagggatttgttctagccttgtttcgttcaacaaaaccatccaccagagtataaagatcggactgaacaagaagcagatctgaagttgctttcactggaaggaacctcgaccgaggtacattgatgccaatagcattgtcaaagaacttgattgctgcaccagctgcagtttctagctgcagaactttaattccatccacttcctttggattaggaatgatctccatcttaagagcttgagcttcgacaagccttttaattgcctttaagttaacccacaagttgtttgtattgaaaatcttgaacttctcaat

SEQ ID NO: 24 - DNA, 704 bp, Pinus radiata
gttttgttgagctactagattttagtaaatcaagaattcatcagctataaattgaggcattcgatttcagttttagttacattttggtgaagttggtcgacctgcattgctgaagatatcgtgcgaagtatgtgatttgtcgagaagatgtcaacaattatagtgccagttccaataccgaccccatctgaagactctgaacgcctgaggaaggcttttgaagggtggggcacaaatgagaagtcaatcatacaaatattaggacatagaactgcagcacaacgcaaagtaatccgtcaaagttattttcaactgtacgaagaggatctcttgaagcgattagaatctgagctttcaagtgactttgagaaagctgtattcctttgggtactagatccagctgaacgtgatgcggtcatatctcatggtgcaataaagaagtggaatgcaaagaatatatcgcttttagaaatttccagtgctcgatcttcggctgaactattgatggtgaggcaagcatatcatattcgggacaaaaagtccctcgaagaagacgtggctgcacatacaagtggaaacttccgtaagttgctggtagcacttgtaagttcatatcggtatgaaggtccggaagtggatatgcatttggcaagttatgaagcaaagaagctaagtgaatctataaccgagcaaaaaagataatt

SEQ ID NO: 25 - DNA, 712 bp, Pinus radiata
gtggatcaaagaatcccattctctcaaaaactagtaccacagtttgggatctcccattttgagaccataaaaatggctacttgttcttgtgctgtctcgtgcggcgtcaaccccgtggaaagggactgtgaggaaatccatctcgcttgcaaaggtctgggaagtgacgaggagaagataatcgaaatacttggaagcaaaaatgagcagcagcggaaggagataagagaaacctattatgcaatgtataaggaagacctgtgcaagaggctggagaaggagcttcatggcaaattagagaaagccatcgtcttatggatgcacgagccagctgaccgggacgctatcattgctggaaccgccctggaaggatggtgcacagatgatcgtgctctaatcgaagtgatttgcacaaggtcctccactcaaatcgttaagattcgtgaagcttaccagaaacgatatcagaggtgcctcgatgatgatgttatttgcaaaacgaatggtccctttcaaaagctacttcttgcactgctcaaagcacaccgatgtgaatgtaaaggagttgacataaacaaagctagatgcgatgccaagatgttgtacgaagcgggcgaaggacggtgtggaaccgatgaggatacttttatccgcatatttcagcgaggagagtgctcccaagtgcacgcaatatttgcttgcaacaagcaaa

SEQ ID NO: 26 - DNA, 789 bp, Eucalyptus grandis
atcgtcttcggctcctcgcgatatcaccaacttgcttccgcacagagagagagagagagagagagagagagaatggcgactatcgcggtgccaccgtcggttccgtctccggctgaggatgccgagcagctccaaaaagctttcgcaggatgggggacgaatgaagatctgatcatatccatactgcctcacagaaacgcagcgcagcggaaagtaatccgacaaacatatgccgagacatatggggaagatcttctcaaagcgcttgacaaggaactctctagtgactttgagagatctgtgcttctgtggaccctggatcctgcggagcgtgatgcattcttgtccaatgaagctaccaagagattgacttcgagcaactgggttctcatggaaattgcttgcacgaggtcttcaatggagttattcatggtgaggcaggcctatcatgctcgttataagaaatctcttgaagaagacatcgcatatcacactactggggatttccgcaagctgcttgttcctctggcaagtacctttcggtatgaggggcctgaggtgaacatgacattggcgagatcagaggctaagatacttcatgagaagattcacgagaaggcttacaatcatgatgagctcatcagaattgttactacaagaagtaaagctcagcttaatgcaaccctcaattactacaacaatgagtttgggaatgccatcaacaaggatctgaaggctgatccaaatgatgaatttctgaaactgctgagatcagcaattaagtgcttg

SEQ ID NO: 27 - DNA, 2132 bp, Pinus radiata
  misc_feature (1)...(2132): n = A,T,C or G
ataaatcagcgtcgactccactgaatgacgcgtttcctgcaattttatacgttttccatttagtccgatcacatgccaatagtatagtcccatcttggaatctgatgctcatataaaattatacggttcatatttttctcatgaatatcaagatgctgttgcagtttctgtgaaaaaaagtgatacatctgttttgaagttgaaaggtatttcaggtgttttggagcacatacttaccattgtgtttgcacgggtcatctgagatattgtgggagaagagatcaaatcaggtcttgttgtaagagatgtcaacaattatagtgccagcgccagctccatccccagttgaagactctgaacgcctgaggaaggcctttgaaggctggggcacaaatgagaagttgattatagaaattttgggacacagnaacncgcagcacagcgcagagcaatcaggcaaacgtacactcagttgtatgaggaagatttcctgaagcgattgcaatcagaactcacacgggattttgagagagctctgctcctctggtcactggatcccccagaacgagatgcacttttagcctatgaatcgataaagaagtggagtccaaataacaggtcacttctggaaatctctagtgctcgatcttcaactgagctgtggtcggtcagacaagcatatcatatacgttacaagaaatctctggaagaagacgttgcttctcatactcatggagacttccgcaagctgctagttcaacttgtaagttcttaccgatatgaaggtccagaagtggatactcgcttggcaaaatctgaagctaagcaattacatgaagctataaaggacaaggctttcggtaacgaggaactcattcgcataataactacaaggagtaaggcacagttgaatgccactttcaattattacaaagatgactatggtcatcatatcaacaaggacttgaaggaatgggaagccagaagacttcctggagtcactacgaattgttatcaaatgcatttgctttcctgaaagatacctttgcaaaggttttgaggttggcataaatcagcgtcgactccactgaatgacgcgtttcctgcaattttatacgttttccatttagtccgatcacatgccaatagtatagtcccatcttggaatctgatgctcatataaaattatacggttcatatttttctcatgaatatcaagatgctgttgcagtttctgtgaaaaaaagtgatacatctgttttgaagttgaaaggtatttcaggtgttttggagcacatacttaccattgtgtttgcacgggtcatctgagatattgtgggagaagagatcaaatcaggtcttgttgtaagagatgtcaacaattatagtgccagcgccagctccatccccagttgaagactctgaacgcctgaggaaggcctttgaaggctggggcacaaatgagaagttgattatagaaattttgggacacagaaccgcagcacagcgcagagcaatcaggcaaacgtacactcagttgtatgaggaagatttcctgaagcgattgcaatcagaactcacacgggattttgagagagctctgctcctctggtcactggatcccccagaacgagatgcacttttagcctatgaatcgataaagaagtggagtccaaataacaggtcacttctggaaatctctagtgctcgatcttcaactgagctgtggtcggtcagacaagcatatcatatacgttacaagaaatctctggaagaagacgttgcttctcatactcatggagacttccgcaagctgctagttcaacttgtaagttcttaccgatatgaaggtccagaagtggatactcgcttggcaaaatctgaagctaagcaattacatgaagctataaaggacaaggctttcggtaacgaggaactcattcgcataataactacaaggagtaaggcacagttgaatgccactttcaattattacaaagatgactatggtcatcatatcaacaaggacttgaaggaatgggaagccagaagacttcctggagtcactacgaattgttatcaaatgcatttgctttcctgaaagatacctttgcaaaggttttgaggttggc

SEQ ID NO: 28 - DNA, 2588 bp, Eucalyptus grandis
ctgactctctctctctctgttttgtctcctccctcctctctctcgttttcgcttcgtcgtgaacgcacccacacgatcttccattccctcaacaatgtcgactctcaccgtcccgcagccactgccccctgtagccgatgactgcgagcagctccggacagccttcgcaggatggggaacaaatgagaagctgatcatatccatattgggtcataggaatgcggcgcagaggaagctgattcggcaaacctatgccgagacttacggcgaggacctcctcaaggcattggacagagaacttaccaatgatttcgagaggctggtggtcctttggtcacttgatccggctgaacgtgatgcgtacttggcgaatgaagcgacgaaaagatggacttcaagcaaccaggttctaatggaaatagcctgcacgaggtctccgcagcagttgcttatggcaagacaagcatatcatgcccgatacaagaagtcgctggaagaggacgtcggtcaccacacaactggagattttcgtaagttgctggtacctcttgtgagctcctaccgttatgatggagatgaggtgaatatgactttggcaaaagcagaggctaagatactccacgagaagatctcagagaaggcttatggccatgaggatctcaataaggattttggctactaggagcaaagcacaggtcaatgctacgctgaatcactacaaaaatgagtttggaaatgatatcaacaaggatttgaaaactgatccaaaagacgcgttccttactatactgagagctacagtaaagtgcctgactcgccctgagaagtattttgaaaaggttcttcgtctagccatcaataagcgaggaacagatgaaggggctctgaccagagtagttgctaccagggccgaggttgacatgaagtttataagtgaggagtaccagaggaggaatagcatccctctcgatcgtgcccattgtcaaggacactactggagactatgaaaaaatgcttctggcattgattggccacgtcgaggcttgatttacaagtactcatgaagctatcctggtggaggcaatatctctgtttttggtgtggtttgaggcatttctattttccttgctttccaacaacgtgtagttaccaacatgcctccccagttgtcagttgtagctatgcgaagcaaatacacttcttataatggcgttggtttatgtacttatgagaagtctttgattttgatctttaatcaagactgctagtaagtgatcgtgaaaaaaaaaaaaaaactgactctctctctctctgttttgtctcctccctcctctctctcgttttcgcttcgtcgtgaacgcacccacacgatcttccattccctcaacaatgtcgactctcaccgtcccgcagccactgccccctgtagccgatgactgcgagcagctccggacagccttcgcaggatggggaacaaatgagaagctgatcatatccatattgggtcataggaatgcggcgcagaggaagctgattcggcaaacctatgccgagacttacggcgaggacctcctcaaggcattggacagagaacttaccaatgatttcgagaggctggtggtcctttggtcacttgatccggctgaacgtgatgcgtacttggcgaatgaagcgacgaaaagatggacttcaagcaaccaggttctaatggaaatagcctgcacgaggtctccgcagcagttgcttatggcaagacaagcatatcatgcccgatacaagaagtcgctggaagaggacgtcggtcaccacacaactggagattttcgtaagttgctggtacctcttgtgagctcctaccgttatgatggagatgaggtgaatatgactttggcaaaagcagaggctaagatactccacgagaagatctcagagaaggcttatggccatgaggatctcataaggattttggctactaggagcaaagcacaggtcaatgctacgctgaatcactacaaaaatgagtttggaaatgatatcaacaaggatttgaaaactgatccaaaagacgcgttccttactatactgagagctacagtaaagtgcctgactcgccctgagaagtattttgaaaaggttcttcgtctagccatcaataagcgaggaacagatgaaggggctctgaccagagtagttgctaccagggccgaggttgacatgaagtttataagtgaggagtaccagaggaggaatagcatccctctcgatcgtgccattgtcaaggacactactggagactatgaaaaaatgcttctggcattgattggccacgtcgaggcttgatttacaagtactcatgaagctatcctggtggaggcaatatctctgtttttggtgtggtttgaggcatttctattttccttgctttccaacaacgtgtagttaccaacatgcctccccagttgtcagttgtagctatgcgaagcaaatacacttcttataatggcgttggtttatgtacttatgagaagtctttgattttgatctttaatcaagactgctagtaagtgatcgtgaaaaaaaaaaaaaaa

SEQ ID NO: 29 - DNA, 627 bp, Eucalyptus grandis
acaatgtcgaactctcaccgtcccgcagccactgccccctgtgagccgatgactgcgagcagctccggaaagccttcgcaggatggggaacaaatgagaagttgatcatatccatattgggccataggaatgcggcgcagaggaagctgattcggcaaacctatgccgagacttacggcgaggacctcctcaaggcattggacagagaacttaccaatgatttcgaggtctgatcttcctttaattttttggattcatcccatggaagacgtgtccttctttctctcagattaatccatattcattccgtatcgtcagaggctggtggtcctttggtcacttgatccggctgaacgtgatgcgtacttggcgaatgaagcgacgaaaagatggacttcaagcaaccaggttctcatggaaatagcctgcacgaggtctccacagcagttgctcatggcaagacaagcatatcatgctcgatacaagaagtcgctggaagaggacgtcgctcaccacacaactggagattttcgtaagttgctggtacctcttgtgagctcctaccattatgatggagatgaggtgaatatgactttggcaaaagcagaggctaagatactccacgag

SEQ ID NO: 30 - protein, 151 aa, Pinus radiata
FRGIQYRRNGWRYGRRVANLNVLGRETAEFTSFRPVFLRGNSQGLSSASSLCDYRIFADSKRKKHAIFRKQNINRSTVVSPRAVSDTFSELTCLDPVASRSVLGIILGGGAGTRLYPLTKKRAKPAVPLGANYRLIDIPVSNCINSNISKI

SEQ ID NO: 31 - protein, 72 aa, Eucalyptus grandis
APALASGAAAFKSVRRAPAVVSPRAVSDSRNSQTCLDPDASRSVLGIILGGGAGTRLYPLTKKRAKPAVPLG

SEQ ID NO: 32 - protein, 124 aa, Eucalyptus grandis
LKDAIISHGCFLRECRVERSIVGERSRLDSGVELKDTVMMGADYYQTESEIASLLAEGKVPIGIGKNTKIRNCIIDKNAKIGKDVAIVNKDGVEEADRPGDGFYIRLGITVILEKATIEDGTVI

SEQ ID NO: 33 - protein, 67 aa, Pinus radiata
IRIVLQGFNWESHRSGGWYHKLSGKAAEIASKGFTIVWLPPPTDSVSPEGYMPRDLYDLNSRYGSLE

SEQ ID NO: 34 - protein, 157 aa, Pinus radiata
NQDAHRQRIVNWINATGGSSSAFDVTTKGILHVALHNQYWRLIDPQGKPTGVMGWWPSRAVTYLENHDTGSTQGHWPFPRDKLTQGYAYILTHPGTPTIFYDHFYDFGLHDTITELIDARTRAGIHCRSTLKIFHANNEGYAAQIDENLVMKLGQFD

SEQ ID NO: 35 - protein, 332 aa, Eucalyptus grandis
PTDSVSPEGYMPRDLYNLNSRYGTIDELKDLVKKFHEVNIRVLGDVVLNHRCAQYQNQNGIWNIFGGRLNWDDRAVVADDPHFQGRGNKSSGDNFHAAPNIDHSQDFVRKDLKEWLHWLRSEIGYDGWRLDFVRGFWGGYVKDYLDASEPYFAVGEYWDSLSYTYGEMDHNQDAHRQRIIDWINATNGTAGAFDVTTKGILHAALERCEYWRLSDQKGKPPGVVGWWPSRAVTFVENHDTGSTQGHWRFPSGKEMQGYAYILTHPGTPAVFYDHIFSHYQSEIGSLISIRNRNKIHCRSTIKITKAERDVYAAIIDDKVAMKIGPGYYEPQS

SEQ ID NO: 36 - protein, 251 aa, Eucalyptus grandis
MMESGVPLCNTCGEAVGVDEKGEVFVACQECNFAICKACVEYEIKEGRKACLRCGTPFEANSMADAERNELGSRSTMAAQLNDPQDTGIHARHISSVSTLDSEYNDETGNPIWKNRVESWKDKKNKKKKAPTKAEKEAQVPPEQQMEEKQIADASEPLSTVIPIAKSKLAPYRTVIIMRLIILALFFHYRVTHPVDSAYPLWLTSIICEIWFAYSWVLDQFPKWSPVNRITHVDRLSARYEKEGEPSELAV

SEQ ID NO: 37 - protein, 127 aa, Pinus radiata
LPRLVYVSREKRPGYQHHKKAGAMNALVRVSAVLTNAPFILNLDCDHYLNNSKAVREAMCFLMDPQLGKKLCYVQFPQRFDGIDRHDRYANRNTVFFDINMKGLDGIQGPVYVGTGCVFNRQALYGY

SEQ ID NO: 38 - protein, 534 aa, Eucalyptus grandis
HYINNSKAIREAMCFLMDPQLGKKLCYVQFPQRFDGIDRHDRYANRNIVFFDINMRGLDGIQGPVYVGTGCVFNRQALYGYDPPVSQKRPKMTCDCWPSWCSCCCGGSRKSKSKKKDDTSLLGPVHAKKKKMTGKNYLKKKGSGPVFDLEDIEEGLEGFDELEKSSLMSQKNFEKRFGQSPVFIASTLMEDGGLPEGTNSTSLIKEAIHVISCGYEEKTEWGKEIGWIYGSVTEDILTGFKMHCRGWKSVYCMPKRPAFKGSAPINLSDRLHQVLRWALGSVEIFLSRHCPLWYAWGGKLKLLERLAYINTIVYPFTSIPLLFYCTIPAVCLLTGKFIIPTLTNFASIWFLALFLSIIATGVLELRWSGVSIEDWWRNEQFWVIGGVSAHLFAVFQGLLKVLAGVDTNFTVTAKAAEDSEFGELYLFKWTTLLIPPTTLIILNMVGVVAGVSDAINNGYGSWGPLFGKLFFAFWVIVHLYPFLKGLMGKQNRTPTIVVLWSVLLASIFSLVWVRIDPFLPKQTGPVLKPCGVEC

SEQ ID NO: 39 - protein, 133 aa, Pinus radiata
LALFLTWRVKNPNTDAYWLWGMSIVCELWFAFSWLLDQLPKLCPINRSTDLAVLKDKFESPTGDNPAGRSDLPGIDCFVSTADPEKEPPLVTANTILSILSADYPVEKLACYVSDDGGALLTFEAMAEAASFA

SEQ ID NO: 40 - protein, 206 aa, Pinus radiata
LLVSQRSFEKSFGQSSVFIASTLMDNGGVPESTNPASLIKEAIHVISCGYEEKTEWGKEVGWIYGSVTEDILTGFKMHCRGWRSIYCMPKRPAFKGSAPINLSDRLHQVLRWALGSIEILFSRHCPLWYGFGAGRLKWLERLAYTNTIVYPLTSLPLIAYCTLPAICLLTGEFIIPTLSNLASIYFMLLFISIIVTGVLELRWSGV

SEQ ID NO: 41 - protein, 239 aa, Eucalyptus grandis
LALRHDREGEPSQLAPVDVFVSTVDPLKEPPLITANTVLSILAVDYPVDKVSCYVSDDGSAMLTFEALSETAEFARKWVPFCKKHNIEPRAPEFYFAQKIDYLKDKIQPSFVKERRAMKREYEEFKVRINALVAKAQKMPEEGWTMQDGTAWPGNNPRDHPGMIQVFLGHSGGLDTDGNELPRLVYVSREKRPGFQHHKKAGAMNALIRVSAVLTNGAYLLNVDCDHYFNNSKALKEAM

SEQ ID NO: 42 - protein, 253 aa, Eucalyptus grandis
ISCGYEDKTEWGKEIGWIYGSVTEDILTGFKMHARGWISIYCMPPRPAFKGSAPINLSDRLNQVLRWALGSIEILLSRHCPIWYGYNGKLRLLERLAYINTIVYPLTSIPLIAYCILPAFCLLTNKFIIPEISNFASMWFILLFVSIFTTGILELRWSGVSIEDWWRNEQFWVIGGTSAHLFAVFQGLLKVLAGIDTNFTVTSKAGDEDGDFAELYVFKWTSLLIPPTTVLIVNIIGIVAGVSYAINSGYQSW

SEQ ID NO: 43 - protein, 469 aa, Eucalyptus grandis
QCFSILAVDYPVDKVSCYLSDDGAAMLSFESLVETADFARKWVPFCKKYSIEPRAPEFYFSQKIDYLKDKIQPSFVKERRAMKRDYEEFKVRVNALVAKAQKAPEEGWSMQDGTPWPGNNSRDHPGMIQVFLGSSGAHDIEGNELPRLVYVSREKRPGFQHHKKAGAENALVRVSAILTNAPYILNLDCDHYVNYSNAVREAMCFLMDPQVGRNLCYVQFPQRFDGIDRSDRYANRNTVFFDVNMKGLDGIQGPVYVGTGCVFNRQALYGYGPPSMPNLPKPSSSCSWCGCCSCCCPSKKPTKDLSEVYRDSKREDLNAAIFNLGEIDNYDEHERSMLISQMSFEKTFGLSTVFIESTLLANGGVPESAHPSMLIKEAIHVISCGYEEKTAWGKEIGWIYGSVTEDILTGFKMHCRGWRSVYCMPLRPAFKGSAPINLSDRLHQVLRWALGSVEIFLSRHCPLWYGFGG

SEQ ID NO: 44 - protein, 805 aa, Eucalyptus grandis
MADRMLTRSHSLRERLDETLSAHRNDIVAFLSRVEAKGKGILQRHQIFAEFEAISEESRAKLLDGAFGEVLKSTQEAIVSPPWVALAVRPRPGVWEHIRVNVHALVLEQLEVAEYLHFKEELADGSLNGNFVLELDFEPFTASFPRPTLSKSIGNGVEFLNRHLSAKLFHDKESLHPLLEFLQVHCYKGKNMMVNARIQNVFSLQHVLRKAEEYLTSLKPETPYSQFEHKFQEIGLERGWGDTAERVLEMIQLLLDLLEAPDPCTLEKFLDRVPMVFNVVIMSPHGYFAQDDVLGYPDTGGQVVYILDQVRALEEEMLHRIKQQGLDITPRILIITRLLPDAVGTTCGQRLEKVFGTEYSHILRVPFRNEKGVVRKWISRFEVWPYLERYTEDVASELAGELQGKPDLIIGNYSDGNIVASLLAHKLGVTQCTIAHALEKTKYPESDIYWKKFEEKYHFSCQFTADLIAMNHTDFIITSTFQEIAGSKDTVGQYESHMNFTLPGLYRVVHGIDVFDPKFNIVSPGADMSIYFAYTEQERRLKSFHPEIEELLFSDVENKEHLCVLKDKKKPIIFTMARLDRVKNLTGLVEWYGKNSKLRELANLVVVGGDRRKDSKDLEEQSEMKKMYDLIEKYKLNGQFRWISSQMNRVRNGELYRYICDTKGVFVQPAIYEAFGLTVVEAMTCGLPTFATCNGGPAEIIVHGKSGYHIDPYHGDQAAELLVDFFNKCKIDQSHWDEISKGAMQRIEEKYTWKIYSERLLNLTAVYGFWKHVTNLDRRESRRYLEMFYALKYRPLAQSVPPAVE

SEQ ID NO: 45 - protein, 133 aa, Pinus radiata
IKQQGLDITPQIIVVTRLIPEAHGTTCNQRIEKVSGTQHSLILRVPFRTEKGVLRNWVSRFDVWPYLERFSEDVTNEVTAELKGQPDLIIGNYSDGNLVASLIAHKQGITQCNIAHALEKTKYPDSDIYWKNF

SEQ ID NO: 46 - protein, 158 aa, Pinus radiata
HGIDVFDPKFNIVSPGADMQIYFPYTEKQHRLTTLHGTIEELLFSPEQTAEHMCALNDRKKPIIFSMARLDRVKNMTGLVEWFAKSKRLRELVNLVVVAGDIDPSKSKDREEVAEIEKMHRLVKEYNLNGQFRWICAQKNRVRNGELYRYICDTRGAF

SEQ ID NO: 47 - protein, 144 aa, Eucalyptus grandis
MADRVLNRSHSPRERLDEALFADRNDCLVFLSRLKAKGKGILQRHQILAVFEAIPEESRARLLDGAFGKVLKSTQEAIVSSPWVALAVRARPGVWEHIRVNVHALLLEHFQVDEYLHFKEALVDGSLNPDSEPLTATFGRRPFH

SEQ ID NO: 48 - protein, 90 aa, Eucalyptus grandis
QEAIVSPPWVALAVRPRPGVWEHIRVNVHALVLEQLEVAEYLHFKEELADGSLNGNFVLELDFEPFTASFPRPTLSKSIGNGVEFRNRHL

SEQ ID NO: 49 - protein, 247 aa, Pinus radiata
MAAAPAVASPAAETDRIPKLQAEVTKLNQISDNEKEGFVRLVSRYLSGEEEKIEWEKIKTPTDEIVVPYDTLAALGEDPSETKELLDKLVVLKLNGGLGTTMGCTGPKSVIEVRNGLTFLDLIVKQIESLNNKYDSKVPLVLMNSFNTHDDTIKIVEKYSGSNIDIHIFNQSQYPRMVAEDLTPWPTKGRTDKEAWYPPGHGDVFPALLNSGKLDELLSQGKEYVFIANSDNLGAIVDLSILFALVF

SEQ ID NO: 50 - protein, 103 aa, Eucalyptus grandis
MAAAATLSAPDAAKLSQLKSAVSGLGQISESEKNGFINLVSRYLSGEAQHVDWSKIQTPTDEIVVPYDSLAPTPQDPAATKSLLDKLVVLKLNGGLGTTMGCT

SEQ ID NO: 51 - protein, 253 aa, Pinus radiata
ANSDNLGAIVDLKILNHLVKNKNEYCMEVTPKTLADVKGGTLISYEGRVQLLEIAQVPEEHVGEFKSIEKFKIFNTNNLWVNLKAIKRLVEADALKMEIIPNPKEVDGVKVLQLETAAGAAIRFFDRAIGVNVPRSRFLPVKATSDLLLVQSDLYTVEEGFVIRNPARVNPTNPTIELGPEFKKVGNFLKRFKSIPSIIDLDSLKVSGDVWFGSGVILKGKVIIEAKQGATLEIPDESVIENKVVSSPDDIVN

SEQ ID NO: 52 - protein, 184 aa, Pinus radiata
MSTIIVPVPIPTPSEDSERLRKAFEGWGTNEKSIIQILGHRTAAQRKVIRQSYFQLYEEDLLKRLESELSSDFEKAVFLWVLDPAERDAVISHGAIKKWNAKNISLLEISSARSSAELLMVRQAYHIRDKKSLEEDVAAHTSGNFRKLLVALVSSYRYEGPEVDMHLASYEAKKLSESITEQKR

SEQ ID NO: 53 - protein, 213 aa, Pinus radiata
MATCSCAVSCGVNPVERDCEEIHLACKGLGSDEEKIIEILGSKNEQQRKEIRETYYAMYKEDLCKRLEKELHGKLEKAIVLWMHEPADRDAIIAGTALEGWCTDDRALIEVICTRSSTQIVKIREAYQKRYQRCLDDDVICKTNGPFQKLLLALLKAHRCECKGVDINKARCDAKMLYEAGEGRCGTDEDTFIRIFQRGECSQVHAIFACNKQ

SEQ ID NO: 54 - protein, 239 aa, Eucalyptus grandis
MATIAVPPSVPSPAEDAEQLQKAFAGWGTNEDLIISILPHRNAAQRKVIRQTYAETYGEDLLKALDKELSSDFERSVLLWTLDPAERDAFLSNEATKRLTSSNWVLMEIACTRSSMELFMVRQAYHARYKKSLEEDIAYHTTGDFRKLLVPLASTFRYEGPEVNMTLARSEAKILHEKIHEKAYNHDELIRIVTTRSKAQLNATLNYYNNEFGNAINKDLKADPNDEFLKLLRSAIKCL

SEQ ID NO: 55 - protein, 242 aa, Pinus radiata
MSTIIVPAPAPSPVEDSERLRKAFEGWGTNEKLIIEILGHRTAAQRRAIRQTYTQLYEEDFLKRLQSELTRDFERALLLWSLDPPERDALLAYESIKKWSPNNRSLLEISSARSSTELWSVRQAYHIRYKKSLEEDVASHTHGDFRKLLVQLVSSYRYEGPEVDTRLAKSEAKQLHEAIKDKAFGNEELIRIITTRSKAQLNATFNYYKDDYGHHINKDLKEWEARRLPGVTTNCYQMHLLS

SEQ ID NO: 56 - protein, 316 aa, Eucalyptus grandis
MSTLTVPQPLPPVADDCEQLRTAFAGWGTNEKLIISILGHRNAAQRKLIRQTYAETYGEDLLKALDRELTNDFERLVVLWSLDPAERDAYLANEATKRWTSSNQVLMEIACTRSPQQLLMARQAYHARYKKSLEEDVGHHTTGDFRKLLVPLVSSYRYDGDEVNMTLAKAEAKILHEKISEKAYGHEDLIRILATRSKAQVNATLNHYKNEFGNDINKDLKTDPKDAFLTILRATVKCLTRPEKYFEKVLRLAINKRGTDEGALTRVVATRAEVDMKFISEEYQRRNSIPLDRAIVKDTTGDYEKMLLALIGHVEA

SEQ ID NO: 57 - DNA, 418 bp, Eucalyptus grandis
ttttgattttgcaaggggatattcaccaaaatatgtcaaagagtacattgaaagtgcaaagccattattttctgttggggaatattgggactcttgcaactacagtggtaccaccttggaatacaatcaagatagtcacagacaacgaattgtaaactggattgatggcacgggacagctttctgctgcatttgacttcacaacaaaaggaattcttcaggaagcagtaaaagggcagttttggcgtctgcgtgatccgaaagggaagccacctggtgtgatgggatggtggccatcaagagctgttaccttccttgataaccacgatacaggctcaacacaggctcactggcctttcccttcaaatcatataaggagggttacacgtacatactcactcatccaggaatacctactg

SEQ ID NO: 58 - DNA, 1396 bp, Eucalyptus grandis
atggatagcttcagcctcttctggctcttcgttcttttggtcttttacctcgccgcctcagcatcccctgccttgttatttcaggggttcaactgggaatcttggaagaaggaagggggatggtacaattcgctcaagaacttggtaccggatttggccaatgctggaattactcatgtgtggcttcctccaccgtctcaatctgccgctcaacaagggtacctgcctgggcggctctatgatctcaatgcttcgagctacgggaatcaggatgagttgaagcatcttattgatgctttccatcaaaagggaatcaaatgcctggccgacatagtgattaaccacaggactgcggaaaaacaagatagccggggaatatggtgcatcttcgaaggcggaacacccgacgaacgtcttgactgggggccgtcctttatttgtcgcgatgacactgagttctctgatggcatgggtaatcttgatacaggtggggacttcaataatacgcccgacatagaccacctcaatccgagggtgcaaaaggagctgtctgactggatgaattggttgaagagcgatataggatttgatgggtggcgattcgatttcgtactgggttatgacccaagcatcaccaaaatctacatggatcggactttgccgaattttgcggtgggagagaactgggactcgctctcttatggacaggataagaagcccaacccaaaccaggatgcacaccgccataagctggcggaatgggtcaatgctgcaggcggggccgtcacggcatttgatttcaccacgaaggggatcctccaggcggccgttgaaggggagctttggcggttgaaggattcaaacgggatgccgccgggattgattggcctccagccaagcagtgccgtgactttcatcgacaatcacgacactggttccacgcaaaaaatatggccgtttccgtccgataaggtcatgcagggatatgcctacatcctcacccatcctggagtcccatccattttctatgatcacttctttgactggggcctgaaggaggagatcggcaagttgacggcgataagggcgcggaaccagattaacgagaagagcagtgtggagatcttggcttccgattctgatttatacgtggccaagatcgacgatggagtgattatgaagattggacctaggtttgaagtaggaaaccttgttcctcccaattatcagattgctacatccggccaagattattgtgtgtgggagaagaagtgatgttcaggcaaacttaagaataagcagcaactgaaagagcaattataggctgcattgtttgaaataaaaatttacaagcggtcttatgcaccgtatggaagtaaaaaaaaaaaaaaaaaaa

SEQ ID NO: 59 - DNA, 1861 bp, Pinus radiata
attgaatttcggggaattcaatacagacgaaatggctggcgttatggccgcaggagttgcaaatttgaacgttctgggccgagaaactgccgagttcacttcgttcaggccggtatttcttcgaggaaattctcagggactctcttcggcctcttctttgtgtgattacagaattttcgcggattccaagcggaagaagcatgcgattttcaggaagcagaatattaatagaagcacagtcgtttctccacgggcggtttctgatactttcagtgaactgacctgtttagatccggtcgcgagtcggagtgtgctgggcattatcctaggaggtggagctgggactcgtctttatccactgactaagaagagagcgaaaccagctgttcctttgggtgccaattataggctgatcgatatccctgttagtaattgcataaatagtaatatctctaagatctatgttcttacccagttcaactcggcttctctcaaccgtcatctttcacgggcctattcaagcaacatgggcagctacaaggatgaaggatttgtggaagtacttgccgctcagcaaagccctgaaaatccaaattggtttcagggaacagcagatgctgtgagacagtacttgtggctttttgaggagcaacaagtaatggaatttctgattctagctggagatcatctctatcgtatggattatcagaaattcattcaagctcacagggaaaccaatgcagatatcaccgtggcagctttacccatggatgagaaacgagcaacagcttttggtctaatgaagattaatgatgaaggccgcatcattgaatttgcagagaaacccaaaggagaagagttgagggcaatgagggtggacactacaattttaggcctggatgaagagagagccaaggagatgccttacatagctagcatggggatttatgttgttagtaaagatgcaatgttgaagcttttgcgtgaacaatttccccaagcaaatgattttggaagtgaagtcataccgggtgccacttcagttggaatggcggtacaggcatatttgtatgatggatattgggaagatattggtaccatcgaggctttttataatgcaaatttgggtattaccaagaagccaataccagacttcagcttttatgatagatctgctccaatctatactcaatctcgatttttgccaccatcgaagatgcttgatgcagatgtgactgacagtgttattggcgagggatgtgtcataaagaactgtcaaattcgccactccgttgttggactacgttcttggatttcagagggtgcaataatagaggatgccttgctcatgggtgctgattactatgaaactgatgaagagcgaagcttgctttcgaataaaggtggtgtcccaattggcattggaaaagactgccatgtaaaaagggcaataattgacaaaaatgctcgtattggaaccaatgtcaagatcatcaacaaggacaacgtgcaagaagctgcgagggaaacagatgggtacttcataaagagtggtattgtaactgtaatcaaagatgctttaattcctagtggtacagtcatttaaaactatttggctgtacacaaattgcctcaaataacactacttttttccccacctttagtcgatataccgggaaaatgcagcaattcaaatatttccttagaaggagagtcctgtattttagtggaaaaataatgtatgacggaagacattgatggtttttgtaattatgtacgaaattttattggtcattgccttcaatgcaaccgtcgatacttttatgctgaaacggtctatatttttatactgttccgagga

SEQ ID NO: 60 - DNA, 145 bp, Eucalyptus grandis
gggacccagctctcgactccgccgatgccttcaagagcgtgaggagagatccggacgtcgtgtctcccagagacgtctccgattcccggaactcgcagacgtgccttaaccccgacgccagccgcagtgttctcggaattatact

SEQ ID NO: 61 - DNA, 441 bp, Eucalyptus grandis
gggccccagctctcgcctccggcgcggctgccttcaagagcgtgcggagagctccggccgtcgtgtctcccagagccgtctccgattcccggaactcgcagacgtgccttgaccccgacgccagccgcagtgttctcggaattatactaggaggtggggccgggacccgtctctaccccctgactaagaagagagcaaaacccgccgtcccgttgggagcaaattacaggctgattgacattcctgtgagcaattgcttgaatagcaacgtatcgaagatctatgtcctcacgcagttcaattctgcatctctcaaccgtcacctttctcgggcttatgccagcaacatgggtgggtacaaaaatgaaggttttgttgaagttcttgctgcccagcagagcccggagaatcctaactggtttcagggcactgccgatgctg

SEQ ID NO: 62 - DNA, 460 bp, Eucalyptus grandis
gctttttgggtttgagatcttctctctctctctgcatcaagattcggagtctgggctcttgaatgctctcttcttgatcactcgttggagttgcacagcatcaaggcttcaagttcggagcttgctttcttggtgagagttgacggcaatggattctcgctgtgtggccctcaaggccaacgcctctttggctcaatcaaacaagagctgtctcaagaatgtagataagggattcttgggtgagagaatcagagggagcctagataacagtgtttgggttaaacaggttgctagaaatctgagagttgaaaaaaagttcaagaaggcgaaacccggagtggcttttgctgttattacatcgaacaccgttgcggagaccttgactattagatctccggtgttgcatagaccaagagcagacccaaagaaagtggccgccattatattggggggaggtgca

SEQ ID NO: 63 - DNA, 341 bp, Eucalyptus grandis
aaaatattcatcttaacgcagtttaattccttttccctcaatcgccacctttcccggacatacaactttgataatggtgttagttttggtgatggatttgtggaggtcctcgcagcaactcaaactccgggtgaagctggaaagaggtggttccaggggactgctgatgctgttaggcaattcatatgggtctttgaggatgccaagaacaagaatgtggagaatatcttgattttgtctggtgaccacctgtaccggatgaattacatggatttcgtgcagaagcatattgattcaaatgccgatatcacagtttcatgtgtcccaatggatgacagtcg

SEQ ID NO: 64 - DNA, 394 bp, Eucalyptus grandis
gcaatatctgttgcctgtactcctgtgggggaaagccgggcatctgattatggattggtgaagatagacagcagaggccaaattgtccaattttctgaaaagcctaagggtcctgatctgacagctatgcaagtagataccaccaccctaggattgtctccgcaagaagctgcaagatctccatatattgcatcaatgggagtttatgccttcaagacggagtccttactaaatcttctgaagtggaggtaccctacagccaatgactttggatctgaaatcattccctcggctgtgatggagcaagatgtccaggcttatattttccgcgattactgggaggatatagggactataaagtccttctatgatgctaatttggctctcacagaag

SEQ ID NO: 65 - DNA, 453 bp, Eucalyptus grandis
gttttcttctttcttttctttctctcagatcgttcggtttgatgacaagttgggatctttttcttgtgggttcttgggttcgttcgatattgggatgcccatttgaaggttgagctcgaaatttatctgggtctggcttcttcttcgctgggtccgttttgtagggatggattcttgcttcgcgagcatgaaggtcggtgcgcgacccgtgccaggaggaggcattatcaattttagtgagttctggggtgaaaacttgagggttggtgctaataagcaatttggagctcggttatgtaagagcttgagaagtgaaacaaggattggacgtgttaaacctggaattgcttactctgttcttactccagaagttgacaaagagaccatgactcttcaagctccagtgttggaaactccaagagcagatccgaagagttttgcttcaattatact

SEQ ID NO: 66 - DNA, 2055 bp, Eucalyptus grandis
atcctggcatgatccaggtttatttgggaagtgctggagcattggacgtggaaggtaaggagttgcctcgacttgtatatgtgtcccgtgagaagcgacctggttaccagcaccacaagaaggctggtgcaatgaatgctctggttcgagtgtcggcagtgctaacaaacgcacccttcttgttgaacttggattgtgaccactacatcaacaacagtaaggctatcagggaagctatgtgttttctaatggatccccaacttggaaagaagctttgctatgttcaatttcctcagaggttcgatggcattgatcgacatgacagatatgctaataggaacatagttttctttgatatcaacatgagagggcttgatgggatacaaggaccagtgtatgttggaactggatgtgtgttcaatcggcaggcattgtatgggtatgatcctccagtgtcccaaaagcggccaaagatgacatgtgattgctggccttcatggtgctcttgttgctgcggtggttcaaggaagtcaaagtcaaagaagaaggatgatacgagtttgcttgggcctgttcatgcgaagaagaaaaagatgacaggaaagaactacttgaagaagaaagggtctggacctgtctttgatctagaagacattgaagaaggacttgagggttttgatgagctagaaaaatcatcgctcatgtctcagaagaattttgagaagcggtttggacagtcacctgtattcattgcctccacactaatggaagatggtggcttgccagaagggactaactccacttcacttattaaggaagctatccatgtcataagttgtggctatgaagagaaaacagaatggggcaaagagattggatggatttatggctccgttacagaagatatcttgacaggcttcaagatgcattgtagaggatggaagtctgtatattgcatgcccaaaagaccagctttcaagggatcagcacctataaatctgtcagatcgactccatcaagttctgagatgggctcttggctccgttgagattttcctcagtcgtcattgtcctttgtggtatgcttggggaggaaaactcaaactgcttgagaggcttgcctatatcaacaccattgtctaccctttcacttccattcctttgcttttctactgtacaatacctgccgtttgccttctcactgggaaattcattatccccacgctcactaactttgcgagcatatggttcttggcccttttcctatccatcatagccactggcgtgcttgaactacggtggagtggtgtcagcatcgaggactggtggcgtaatgaacaattctgggtcattggtggcgtatctgcacacctcttcgctgtattccaaggcctcctcaaggtgcttgccggagttgatactaacttcactgttacagcaaaggcagccgaggacagtgagtttggtgaactctaccttttcaagtggactaccctgctcataccaccaaccactctaataatcttgaacatggtcggtgtcgtcgccggtgtttcggatgccataaacaatggatacggatcgtggggccctctgttcgggaagctcttcttcgccttttgggtgatcgtccatctctaccctttcctcaaaggtctgatgggaaaacagaacaggacacccacgatcgtggtcctttggtccgtacttctcgcctctattttctcattggtctgggtccggatcgatccgttcctgcccaagcaaaccggtccagttctcaaaccgtgtggggtggagtgctgattctggcgtcggatttcattcaacacgccgtctctccgacccgattagatgtgtcgctttacggagctgtttctttctgtctcttacttgggacatattgtaatgcactaggggaaatcttcccgattgaaatctcttgattagcataggttttgcttgaagagtgtggaactgaaatgtgcaaagtcctggttttgaactttttgcaatatattctgctcaagattaagcaaaaaaaaaaaaaaaaaaa

SEQ ID NO: 67 - DNA, 669 bp, Pinus radiata
gcctaacgagtttcctttgtatactacactggaaaagaaatcactcttatacagagcttattcgtgcacccacttttgtgcaataatcggtctcatatgttatcgcttgttgtatatcccaagtgaggattcttggtcatggattctgatatttgtcgcagaactaggcttctcgtacagctggattctggaccaagccctaagatggtggccagttcaacgaacagtcttcccaaagagactttctaagaggtttcagagcaatttaccgcctgtggatatctttatttgcactgctgatcctttcaaagaacctccactgactgttataaacacagtattgtccgctcttgccgtacattatcccatgggaaaattgtcttgttatgtttctgacgatggaggatcacctctgacattttatgctctgttggaagcttcacgttttgcaaagatctggattccattttgtgataaatactccattgaagacagatgtccagaggtttacttctcaaatcccagtgctctggaaaacgtaaatctgtccttcatgacggactggaggcatgtaaataagatgtattttgaattgaaagatcgaatcaacaacgtcatggagatgggcagtgtccaccagataaacagaatgaacaccaaggattcaag

SEQ ID NO: 68 - DNA, 403 bp, Pinus radiata
caacaacatacgtgtgcttgcttcgcctttggtgattgaagcaagctgctgatggagcctaacgactttcctttgtatactacactggaaaagaaatcactcttatacagagcttattcgtgcacccacttttctgcaataatcggtctcatatgttatcgcttgttgtatatcccaagtgaggattcttggccatggattctgatatttgtcgcagaactaggcttctcgtacagctggattctggatcaggccctaagatggtggccagttgaacgaacagtcttcccaaacagactttctaagaggtttcagagcaagttaccgcctgtggatatctttatttgcactgctgatcctttcaaagaacctccactgactgttataaacacagtattgtccg

SEQ ID NO: 69 - DNA, 3851 bp, Pinus radiata
ccttgagcgtcatggatgaatttctgtatatggatctgatctgatagaaattcagtgtctgaatcttgtctttttttatcacaggggcgaagctttcatgcaggactttttagcttaaattttttgaatttggcagagaattgaacttaacaatggaagccagcgccggcttggttgccggttctcataacagaaacgagttcgtggtcatccatggacatgaggagccgaagcctttgaacacgttgagtggccacgtctgccagatttgtggcgaggacgtcgggcttaacacagacggcgagctgttcgttgcctgtaatgagtgcgggtttcctgtctgtcggccgtgctatgagtacgagagacgagaaggaaatcagtcgtgcccgcagtgcaatactcgttacaagcgtcaaaaagggagtccacgggtggaaggtgacgatgatgaagaagacgttgatgacatagaacatgaatttaatgtggagactcagcaaagaaacaggcagcagatcaccgaggcgatgctccacggacgcatgagctatggccgaggtcccgacgacgaaaattcgcagattgctcataatccagagcttcctccgcagattcctgtacttgcaaacggccactcggttgtgagtggggagattccaacgtcatactacgcagacaaccaattgcttgccaaccctgcaatgctgaagcgtgtgcatccaagctccgagccggggagtggaaggatcatcatggatccaaacagggatattggttcttatggctttgggaacgtgtcttggaaggagcgaggcgatggttataaatcgaaggaaaacaaatcaggccagttggatatgacggaagggagatatcaatataatggggggtttgcaccaaatgagcctgaagattatattgatcccgatatgccaatgaccgatgaagcaaggcagccactgtcccgaaaagtgccaattccttcaagcaaaataaatccataccgaatggtcattgtaattcgactgatagtgctgggtatttttctccgctatcgtctcctgaatccagtgaagaatgcatatgggctctgggccacttctatcgtttgtgaaatctggtttgccttgtcatggattcttgatcagtttcccaagtggttgcctatcagtcgtgaaacgtatcttgatcgactgtcattaaggtacgaacgagaaggcgaaccatcaatgcttgcacctgttgacctctttgtgagtactgtagatccactgaaggagcctcctttggttactgccaatacagtattatcaatcctttcagtagactaccctgtagacaatgtgtcctgttatgtctctgatgacggagcgtcgatgcttacttttgaatctctctctgagacctcagaatttgccagaaaatgggtaccattctgcaagaaattcgacattgagcctcgcgctcccgaaatctatttctctcagaaaattgactatctgaaggacaaatttcaacccacctttgtcaaagagcgccgtgccatgaagagagaatatgaagaattcaaggtgcgcatcaatcggttggttgcaaaggcctctaaagtgcccaaggaaggatggacaatgcaagacggtacgccttggcctggtaataatacccgtgaccatcctggtatgatccaagtgttcttgggtcacagtggcggcctcgatacagaaggcaatgagcttcctcggctagtatatgtttctcgtgagaagagacctggtttccagcatcacaagaaggccggtgccatgaatgctttggttcgggtttctgctgtgctcaccaatgctccatttatgctgaatctggattgtgatcactacattaacaatagcaaggcaatcagggaaggcatgtgctttatgatggatcctcaggttgggagaaaagtctgttatgtccaattccctcagagattcgatggtattgatcgcaatgaccgttacgccaatcgaaacaccgtattctttgatatcaacatgaaaggtctggatggaattcaagggcctgtatatgtgggaactggatgcatgttcagaagacaagctctatatgggtatgggcctcccaaaggcccaaaacgtcccaagatggtgacctgtgattgtctcccttgttgcggtcctcgtaagaagtctccgaagaaaaatagtagcaagaaaagtgcaggaatcccagctcccgcctacaatctggacgggatcgaggaaggagtagaaggttatgatgacgaaagagcattgttgatgagccaactagacttcgagaagaagtttggccagtcttcagcttttgttcaatccactctgatggagaatggtggtgttccgcaaacagcaaatccagctgaattgttgaaggaggctattcatgtcatcagctgtggatatgaagacaaaacggaatggggaaaagagcttggatggatctatggatcagtcacagaggacattctgactggattcaagatgcacactcgaggctggcggtccatttactgtatgcccaaacgagcagcattcaaagggtctgctccaatcaatctatcagaccgtttgaaccaggtgttgcgttgggctttgggatcagtagaaattttcatgagcagacattgcccaatctggtatggctatgggggaggtctgaaatggcttgaaagatttgcctatatcaacaccattgtctatccattcacctctcttccactcattgcctattgcacacttccagccgtcagtttgctcactggcaaatttgtgatccctcagatcagtacttttgcaagtctatttttaatagctcttttcatctcaatttttgccactggtattctgaaaatgaggtggagtggagtgagcattgaagaatggtggcgaaatgaacagttctgggttattggaggggtttctgcacatttttttgcagttattcaaggtctgctcaaggtactggcaggcattgatacaaatttcacagtcactgccaaggcatcagatgacggtgagtttggggaactgtatgcattcaaatggaccacactcctcattcctcctacaaccctgcttgtcatcaaccttgtgggggtggttgttggcgtagcagatgcaatcaacaatggatttcagtcatggggtcctctcttgggtaagcttttctttgcattctgggtcattgtgcacctgtatcctttcctcaagggtctcatgggcaggcagaaccgaacacccaccatcgtggttatttggtcaattctgctggcatctgttttctctcttttctgggtaagaattgatcctttcttgagtaaggttaaaggcccagatactaaacaatgtggcatcaactgctgatttctttgatattcaagtttcaatcttctggaagagagcaatgagaacaacagagaaacacttcagaggctccaagcttatactagataacagagcactggggaaagtatttcctattttttgtttataaattcttagtatgtggataattggaggcttttagtttccggaggacaaatttgatctgggctctttgaaatatgcttcaaagaatacaagaaaaaagtttagtttaaatagtaaatgttgattctctcagctaagacacgaaggacccctggtagatgccatctgcagctggattttattgtttgtaaggatataccattggccgtcaacttacctctgctattattttatatccctggaatgtaattcattaactcgtgcccataattaggcagcttttacgagtttgagattgttgtaaaaaaaaaaaaaaaa

SEQ ID NO: 70 - DNA, 736 bp, Pinus radiata
aaccatataaaactattgccattcgcacaggaacagaacgacgagatcatggaggccagggcgggacttgttgcaggttcctataagcggaacgagcttatggtagtccctggacacgatgggcccaagcccatcaggctatccaccctccaggattgccaagtctgcggagataaaatcggctgcaacccgaatggagaactattcgtggcctgcaacgagtgtggattccctgtgtgtcgtccctgttatgagtacgagagaaaggatgggaaccggtgctgccctcagtgcaagactcggtacaggcgtcacaaagggagtccccgggttgaaggcgatgatgaagaagatggcatggacgacttagaacaagaattcaacatggaaagagatcgccaaagcgtagtcagtcacagaggaaacgccttcgacgctactcctcgggctgcccacagtatcgctaaccgctcgataaatggagataattatgcactttcccttcctccgatcatggatggcgacagtttaagtgttcagcgttttccacatgcagctactgtgattggaaatggattagatccagtcaaggagaactatgggagtgctgcatggaaggagagagtggagaattggaaagcgaagcacgataagaaaagtggcagcatcaaggatggcatatatgatccagacgaggccgatgatataatgatgactgaagccgaagcgagacagc

SEQ ID NO: 71 - DNA, 448 bp, Eucalyptus grandis
gcttgaaagagttagtggaacagaacatagtcatatcttacgagttcctttcagatctgatcaaggaattctgcgtaaatggatctctcggtttgatgtgtggccttatctggagacgtttgccctggatgcagcacatgaaattacagcggagttacaaggctttcctgattttataattgggaactatagtgatggtaatctggttgcttcattattggcttataaaatgggagtcacacagtgcaccatagcacatgctttggagaagacaaaatatccggactctgacatatattggaaaaagtttgatgagaagtaccacttttcatgtcaatttactgctgacttactagccatgaataatgcagactttatcatcaccagcacataccaagagatagcaggaacgaaaaataccgttgggcagtatgagagccacactgcc

SEQ ID NO: 72 - DNA, 448 bp, Eucalyptus grandis
gaacgattgacaaacaatccttctcgatatcgtttcccagactgaggaaactagaactttctcttcagcttgataacttgcgaaagcaggaacgaaaaataccgttgggcagtatgagagccacactgccttcactcttccagggctgtacagagttgttcatgggattgatgtttttgatccaaagttcaacattgtctcccctggggcagatatgtgcatctatttcccctactctgaaaagcagaagagactcacagctttgcatggatcaatagaaaagctgctatatgatcctgaacaaaatgatgagcacataggatcattgtctgatcggtccaagcccatgatcttttccatggcaaggctggacaaagtgaagaatatgacagggctggttgaatgctatgctaagaattcaaaattgagggaactagcaaatcttgta

SEQ ID NO: 73 - DNA, 184 bp, Eucalyptus grandis
ggaagccatagttttgcctcctttcgtggctatagcagttcgtccaaggcctggtgtctgggaatatgtccgtgtgaatgtccatgaactgagtgtagagcaactgactgtttcagagtatctgggattcaaggaagaacttgtggatggcaagtctgaagacagttttgttcttgagcttgat

SEQ ID NO: 74 - DNA, 1145 bp, Pinus radiata
gctgtgttggcatcgatccaaaggcaaatatggtttctgcaaggctgactcgttctctgagttctcgagagcgtgttgaggacacgctatctgagcaccgcaatcaactagttgctctgttttcaagatatgtagcacaggggaagaaggttttgcaacctcatgaaatattagatggattagcagcagtaataggagagaatgatgaacaccaaaatttccgagatgggctatttggaaatgtcttgaggtccacacaggaggccatcattattccaccatgggttgttcttgctgtacgaccaaggcctggtgtgtgggaatttgttcgtgtcaatgttgatgaacttgctgttgaacagctttctgtagctgaatatttggaattcaaggaacaacttgtggatggaagtgtcaaggataattacgtattggagttagatcttgagcccttcaatgcatcctttcctcgcccaacacagccatcttccattggcagtggagttcaatttttgaatcgacatttgtcctccagactattccgtgatcatgaaagcatgcagcccttgctggatttccttcgagcacacaaataccaaggccagaggctgatgctgaatgagaggatacagagtttgaccaagctacgatcatcattggtaaagacagaggaaaatcttagcaagctcccaaagaacacaccatatacagagttcgaacacagcttacaagaaatgggattggaaaaaggatggggagacaatgcagaacgtgttttggatatgattcatttgctcttggagatccttcaggcacccgatccatcgagattagaaacgtttcttggaaggattcctatggtctttaatgttgtgattctttcacctcatggttattttggccaagcaaatgttttaggaatgccagacactggtggacaggttgtgtatatacttgatcaagttcgtgccttggagagtgaaatgctgctgaaaataaagcggcaaggattggacattacacctcaaattattgtggtgactcggttgattcctgaggcccacgggacaacatgcaatcaacgaattgaaagaattaagtgggacacaatattcacggatactgcgggtgcccttcagactgaa

SEQ ID NO: 75 - DNA, 1169 bp, Pinus radiata
aagggaccaaaagttggagctcgcgcgcctgcaggtcgacactagtggatccaaagaattcggcacgagatggaattgatgtttttgatcccaagttcaacattgtttctcctggagcagacatgcagatttatttcccttatacagaaaagcagcatcgccttactactttacatggtacaattgaggaactcttgttcagtcccgaacagacagctgaacatatgtgtgctttgaatgaccgtaaaaagcccattatcttttctatggcaagactcgaccgggttaaaaatatgacaggattggtcgaatggtttgcaaagagcaaacgcttgagggagttggttaaccttgtcgtggttgctggtgatattgacccatcaaagtccaaagacagagaagaagtggccgaaattgaaaaaatgcatagactagttaaagagtataacctgaatgggcagttcagatggatatgtgcacaaaagaatagagtgcggaacggtgagctttaccgctacatctgtgacaccaggggtgcctttgtacagcctgcactttatgaagcttttgggcttactgttgttgaagcaatgacatgtggtcttcctacattcgcaacctgtaatgggggtcctgctgaaattattgtggatggggtgtccggatttcatattgatccctaccatggcgtttctgcaactgaacgcattgctgactttttcgagaagtgcaagacagatcccagtcattgggagaagatctctaatggtggtctacagcgtatctatgaaaagtatacatggcagatttatgccgacagattaatgacgctgtctggagtttatgggttttggaagtatgtatcaaaacttgaaaggcgagagacacgccgctatctggagatgttttacagcttaaagtacagaaatctggttaaaactgtgccattagctgttgaagaaagtgtcaatgggattgaagagaagagtacagaattccgttggttgcactcgtgccgctcgtgccgaccccggcacttcgcccaatagcagccagtcccttcccgcttcagtgacaacgtcgagcacagctgcgcaaggaacgcccgtcgtggccagccacgatagccgcgctgcctcgtcttgcagttcattcagggccaggtaagt

SEQ ID NO: 76 - DNA, 420 bp, Pinus radiata
atcaaatttagaaacgtttctaggaagggttcctatggtctttaatgttgtgattctttcacctcatggttattttggccaagcaaatgttttaggaatgcccgacaccggtggacaggttgtgtatatacttgatcaatgtcgcgccttggagaatgaaatgctattgagaataaaacaacaaggattggacattacgcctgagattattgtggtgactcggctgatccctgaggctcacgggacaacatgcaatcaacgacttgaaaaaattagtggaacacaacattcacggattctacgggtgcccttcagaacagaaaaaggagtcgtgcgcgactgggtttctcgatttgatgtgtggccttacttggaaagattttcggaggatgtaacaaatgaaatagccgtggagctgaa

SEQ ID NO: 77 - DNA, 448 bp, Pinus radiata
gttgccacatcctgcaatgttgagctcttactttcattgaaggtgtttctgttaattcgtctatctctttagaagttcctcgcctctgtatttcacaaaagtttcaggagtgtctgtgttgtaattccagtgtggacggaattgaattctgttatcagaggatccaccagcattgtaggagggctaataggcaacagcaaataacagttaaattctccttttaattgttggtattggcatccatataaaagcaaaggaaaatatggttgctgcagcgctcacccatgcactgagttcacgagagcgtgttgaggacatgctctctgaacaccgcaatgaaatagtttctctgctttcaagatatgtagcagaagggaagaagattttgcagcctcatcaactattagatggactagaagaggcataggaagaatgttgacttgaaccc

SEQ ID NO: 78 - DNA, 372 bp, Eucalyptus grandis
gcgctctcccacgcactctgcttccagaccccggatacccacgtgtatatatacccgtctcccgtcgtcagcaggggtggaggattcttgggtttctgctctgttcgtcgatcggcttgagggaaggttcgaaggtgactgaaactcggcgtgttctgtcatggcggctccgaaactgggtcgaatcccgagcatcagggaccgggtcgaggacactctcgccgctcacaggaacgaactcgtctctcttctctccaggtatgtggctcaggggaaggggattctgcagccgcatcatttgctggacgagctcgagaacatcatcagcgaggacgaagggaagagctctctcagcgatggccccttcagtga

SEQ ID NO: 79 - DNA, 1960 bp, Eucalyptus grandis
cggccgagattggttacacttgttattctcccccccgtcgctagccggccacttttatatcctcctcccgtttcgtactcttcactcatctccctccccaaaagcccaatcgaatctcgctcctccttttttttatcttccacatcaccaccttcctcctcctcctcctcctcctcagcgttctctccacgttcatctccatcgctgtctccctctcagatccggagctcttcttcgctagcccgccaatggctgccgctgccaccctgagcgcccccgacgctgcgaagctctctcagctcaaatcggccgtctccggcctcggccaaatcagcgagagtgagaagaatggattcatcaacctcgtgtctcgctatctcagtggcgaagctcaacatgttgactggagcaagatccagacgcccactgacgaaattgtcgtcccttacgatagcttggcgcccactccccaggatcctgcagcgaccaagagccttttggacaaactcgttgtgctgaagctcaatggtggtttgggaactacgatgggttgtactggtcccaaatctgtcatagaagtacgcaatggattgacatttcttgaccttattgttatccaaattgagaatctgaacactaaatatgggtgcaatgttcccctgcttctgatgaactcttttaacacccatgatgatacgttgaagattgttgaaaaatatgccaactcaaatatagatattcatacttttaatcagagccagtatccccgtttggttgttgaggattttatgccactgccttgcaaaggacagactggaaaagatggatggtatcctcctggtcacggtgatgtgttcgcatccttgatgaacagtggcaaacttgatgctttgctctcacagggcaaggaatatgtttttgctgccaactcagataacttgggtgctattgttgacctgaagatcttaaatcatttgatgacaaacaagaacgagtactgtatggaggttactccaaaaaccttagctgatgtgaagggtggtacactcatatcttatgagggaaaggttcaactcttggaaattgcacaggtccctgatgaacacatcaatgagttcaaatcaattgagaagttcaagattttcaatacaaacaacttgtgggttaacttaaaggcaattaaaaggcttgtcgaagctcaagctcttaagatggagatcattcctaatccaaaggaagtggatggaattaaagttctgcagctagaaactgcagctggtgcagcaatcaagttctttgacaatgctattggcatcaatgtacctcggtcgaggttccttccagtgaaagcaacttcagatctgcttcttgttcagtccgatctttatactctggtggatggttttgttgaacgaaacaaggctagaacaaatccctcaaatccttcaatcgaattgggccctgagtttaagaaggttggcaatttcttgagcagattcaagtcaattcccagcattattgagcttgatagcctgaaggtgtctggtgatgtatggtttggcactggcattactctcaagggaaaggtgaccattgctgcaaaacctggggttaagctggaaattccggatggggtggtgctggaaaacaaggaaatccatggccctgaggacctctagagtcaccacttggttttccagaaggaaacatattgagagtagtatttgatcttgcactggagaccccgagtatgttggtgtaatctttacatatttggttaggtaaataagtggacaattccgtttgaagcatcttaacccgaaccttgggaaggcgaggattttacaattttgcttgtttgaaaagagagtgagaaacgctgctaaaccagtgaggtcatttaaatgtgccgtctgctctttctgctgtataagtacctgttgaatgccaaaaaaaaaaa

SEQ ID NO: 80 - DNA, 2045 bp, Pinus radiata
gtgatctcggcgccactggttttgggtgagacatcttggtttccagagcccggcggtggacatccgaaattttcgtgactgcacatcttcttcgcataattcgccggaatatactctcattgctccgctccaactaaacataaagggaggtggaggaggaggtggtggcaacactacgattgatcggctgagaggatttatatgataattcttcgctattcaacatagcgttaacaggaagcataagtgcgtaacagtttcgtcttctacgcacgctctgatctgtccgcgacggggatatttctatcacgaccgaaaatggctgcagcaccagcagttgcttcacccgcagccgaaactgatcggatccctaaacttcaagccgaggtcacgaagctgaaccagatcagtgataatgagaaggaagggtttgtgcgactggtttctcgctacctcagcggcgaagaagagaagattgaatgggaaaaaatcaagaccccgactgacgagatcgtggttccctacgatacgttggcagctttgggagaagatccatcggaaaccaaggaactcttggacaagcttgttgtgttaaagcttaatggcggtttgggaacaaccatgggttgtactgggcccaaatccgtcattgaagtacgaaatggcctaacatttctggacttgattgtgaagcaaatagagtctctgaacaacaaatacgattccaaagttccgttggtgctgatgaattcatttaatacacatgatgatacaattaagattgtagaaaagtactctggctcaaatattgacatccacatcttcaaccagagtcaatatccacgcatggtggcagaagatttgacaccatggccaactaaaggtcgtacagacaaagaagcatggtacccacctggccacggagatgttttccccgctcttttgaacagtgggaagcttgatgaactactctcacagggtaaggagtacgtgttcatagctaactcagacaacttgggagcaatagttgatctcaaaattttgaatcatctggtcaaaaataaaaatgaatactgcatggaggtcactcccaaaacgcttgcagatgtaaaaggtggtacacttatctcttatgaaggcagagttcagcttctagagattgcacaggttccagaggagcatgttggcgaattcaaggcgattgaaaagttcaaaatcttcaataccaataatttatgggtgaacttgaaggcgattaagaggcttgtggaggctgatgctcttaaaatggagataattcctaatccaaaggaagtggatggggtaaaggtgcttcagcttgaaacggctgcaggtgctgctataaggttttttgatcgtgcaattggtgtcaatgttccaagatcacgctttctcccagtgaaggcaacttcagatttactacttgtgcagtcggatctttacactgtggaggaaggttttgtcatccgaaatcctgctagagtcaaccctacaaatcccaccattgagttgggtcctgaattcaagaaggttggcaactttctaaagcgtttcaagtccatacctagcatcattgatcttgatagtctaaaggtgtcaggtgatgtgtggtttggcagtggagtcatcctgaagggaaaagttataattgaagcaaagcagggggctacacttgagatacctgatgaatctgtgatagaaaacaaggtagtgagcagtcctgatgatattgtgaactagcttataagttttggcagttggcattcttgatttttgggttgtttgtagagctagaatactgtgtttagtgcccttaaagagtagggtggaagtttcacctctggttttatcttccataatccttactgggaggggtttcataattttattataactagccagtttctatgtaaatgttgagcgcgaatttttatgcatgaaagcctaggatgaagcatccaaacacaataaataaatggtgctttgttgagattttttaaaaaaaaaaaaaaaaaaaaaaaaaa

SEQ ID NO: 81 - protein, 139 aa, Eucalyptus grandis
FDFARGYSPKYVKEYIESAKPLFSVGEYWDSCNYSGTTLEYNQDSHRQRIVNWIDGTGQLSAAFDFTTKGILQEAVKGQFWRLRDPKGKPPGVMGWWPSRAVTFLDNHDTGSTQAHWPFPSNHIRRVTRTYSLIQEYLL

SEQ ID NO: 82 - protein, 189 aa, Eucalyptus grandis
LFWLFVLLVFYLAASASPALLFQGFNWESWKKEGGWYNSLKNLVPDLANAGITHVWLPPPSQSAAQQGYLPGRLYDLNASSYGNQDELKHLIDAFHQKGIKCLADIVINHRTAEKQDSRGIWCIFEGGTPDDRLDWGPSLICRDDTEYSDGRGNLDSGEDFKPAPDIDHLNPRVQKELSDWMNWLKSDI

SEQ ID NO: 83 - protein, 176 aa, Eucalyptus grandis
FGEFNTDEMAGVMAAGVANLNVLGRETAEFTSFRPVFLRGNSQGLSSASSLCDYRIFADSKRKKHAIFRKQNINRSTVVSPRAVSDTFSELTCLDPVASRSVLGIILGGGAGTRLYPLTKKRAKPAVPLGANYRLIDIPVSNCINSNISKIYVLTQFNSASLNPSSFTGLFKHMGS

SEQ ID NO: 84 - protein, 47 aa, Eucalyptus grandis
DPALDSADAFKSVRRDPDVVSPRDVSDSRNSQTCLNPDASRSVLGII

SEQ ID NO: 85 - protein, 146 aa, Eucalyptus grandis
APALASGAAAFKSVRRAPAVVSPRAVSDSRNSQTCLDPDASRSVLGIILGGGAGTRLYPLTKKRAKPAVPLGANYRLIDIPVSNCLNSNVSKIYVLTQFNSASLNRHLSRAYASNMGGYKNEGFVEVLAAQQSPENPNWFQGTADA

SEQ ID NO: 86 - protein, 84 aa, Eucalyptus grandis
ELTAMDSRCVALKANASLAQSNKSCLKNVDKGFLGERIRGSLDNSVWVKQVARNLRVEKKFKKAKPGVAFAVITSNTVAETLTI

SEQ ID NO: 87 - protein, 113 aa, Eucalyptus grandis
KIFILTQFNSFSLNRHLSRTYNFDNGVSFGDGFVEVLAATQTPGEAGKRWFQGTADAVRQFIWVFEDAKNKNVENILILSGDHLYRMNYMDFVQKHIDSNADITVSCVPMDDS

SEQ ID NO: 88 - protein, 131 aa, Eucalyptus grandis
AISVACTPVGESRASDYGLVKIDSRGQIVQFSEKPKGPDLTAMQVDTTTLGLSPQEAARSPYIASMGVYAFKTESLLNLLKWRYPTANDFGSEIIPSAVMEQDVQAYIFRDYWEDIGTIKSFYDANLALTE

SEQ ID NO: 89 - protein, 115 aa, Eucalyptus grandis
RLSSKFIWVWLLLRWVRFVGMDSCFASMKVGARPVPGGGIINFSEFWGENLRVGANKQFGARLCKSLRSETRIGRVKPGIAYSVLTPEVDKETMTLQAPVLETPRADPKSFASII

SEQ ID NO: 90 - protein, 600 aa, Eucalyptus grandis
PGMIQVYLGSAGALDVEGKELPRLVYVSREKRPGYQHHKKAGAMNALVRVSAVLTNAPFLLNLDCDHYINNSKAIREAMCFLMDPQLGKKLCYVQFPQRFDGIDRHDRYANRNIVFFDINMRGLDGIQGPVYVGTGCVFNRQALYGYDPPVSQKRPKMTCDCWPSWCSCCCGGSRKSKSKKKDDTSLLGPVHAKKKKMTGKNYLKKKGSGPVFDLEDIEEGLEGFDELEKSSLMSQKNFEKRFGQSPVFIASTLMEDGGLPEGTNSTSLIKEAIHVISCGYEEKTEWGKEIGWIYGSVTEDILTGFKMHCRGWKSVYCMPKRPAFKGSAPINLSDRLHQVLRWALGSVEIFLSRHCPLWYAWGGKLKLLERLAYINTIVYPFTSIPLLFYCTIPAVCLLTGKFIIPTLTNFASIWFLALFLSIIATGVLELRWSGVSIEDWWRNEQFWVIGGVSAHLFAVFQGLLKVLAGVDTNFTVTAKAAEDSEFGELYLFKWTTLLIPPTTLIILNMVGVVAGVSDAINNGYGSWGPLFGKLFFAFWVIVHLYPFLKGLMGKQNRTPTIVVLWSVLLASIFSLVWVRIDPFLPKQTGPVLKPCGVEC

SEQ ID NO: 91 - protein, 222 aa, Pinus radiata
PNEFPLYTTLEKKSLLYRAYSCTHFCAIIGLICYRLLYIPSEDSWSWILIFVAELGFSYSWILDQALRWWPVQRTVFPKRLSKRFQSNLPPVDIFICTADPFKEPPLTVINTVLSALAVHYPMGKLSCYVSDDGGSPLTFYALLEASRFAKIWIPFCDKYSIEDRCPEVYFSNPSALENVNLSFMTDWRHVNKMYFELKDRINNVMEMGSVHQINRMNTKDS

SEQ ID NO: 92 - protein, 121 aa, Pinus radiata
SKLLMEPNDFPLYTTLEKKSLLYRAYSCTHFSAIIGLICYRLLYIPSEDSWPWILIFVAELGFSYSWILDQALRWWPVERTVFPNRLSKRFQSKLPPVDIFICTADPFKEPPLTVINTVLS

SEQ ID NO: 93 - protein, 603 aa, Pinus radiata
LKFFEFGRELNLTMEASAGLVAGSHNRNEFVVIHGHEEPKPLNTLSGHVCQICGEDVGLNTDGELFVACNECGFPVCRPCYEYERREGNQSCPQCNTRYKRQKGSPRVEGDDDEEDVDDIEHEFNVETQQRNRQQITEAMLHGRMSYGRGPDDENSQIAHNPELPPQIPVLANGHSVVSGEIPTSYYADNQLLANPAMLKRVHPSSEPGSGRIIMDPNRDIGSYGFGNVSWKERGDGYKSKENKSGQLDMTEGRYQYNGGFAPNEPEDYIDPDMPMTDEARQPLSRKVPIPSSKINPYRMVIVIRLIVLGIFLRYRLLNPVKNAYGLWATSIVCEIWFALSWILDQFPKWLPISRETYLDRLSLRYEREGEPSMLAPVDLFVSTVDPLKEPPLVTANTVLSILSVDYPVDNVSCYVSDDGASMLTFESLSETSEFARKWVPFCKKFDIEPRAPEIYFSQKIDYLKDKFQPTFVKERRAMKREYEEFKVRINRLVAKASKVPKEGWTMQDGTPWPGNNTRDHPGMIQVFLGHSGGLDTEGNELPRLVYVSREKRPGFQHHKKAGAMNALVRVSAVLTNAPFMLNLDCDHYINNSKAIREGMCFM

SEQ ID NO: 94 - protein, 245 aa, Pinus radiata
NHIKLLPFAQEQNDEIMEARAGLVAGSYKRNELMVVPGHDGPKPIRLSTLQDCQVCGDKIGCNPNGELFVACNECGFPVCRPCYEYERKDGNRCCPQCKTRYRRHKGSPRVEGDDEEDGMDDLEQEFNMERDRQSVVSHRGNAFDATPRAAHSIANRSINGDNYALSLPPIMDGDSLSVQRFPHAATVIGNGLDPVKENYGSAAWKERVENWKAKHDKKSGSIKDGIYDPDEADDIMMTEAEARQ

SEQ ID NO: 95 - protein, 149 aa, Eucalyptus grandis
LERVSGTEHSHILRVPFRSDQGILRKWISRFDVWPYLETFALDAAHEITAELQGFPDFIIGNYSDGNLVASLLAYKMGVTQCTIAHALEKTKYPDSDIYWKKFDEKYHFSCQFTADLLAMNNADFIITSTYQEIAGTKNTVGQYESHTA

SEQ ID NO: 96 - protein, 124 aa, Eucalyptus grandis
LAKAGTKNTVGQYESHTAFTLPGLYRVVHGIDVFDPKFNIVSPGADMCIYFPYSEKQKRLTALHGSIEKLLYDPEQNDEHIGSLSDRSKPMIFSMARLDKVKNMTGLVECYAKNSKLRELANLV

SEQ ID NO: 97 - protein, 61 aa, Eucalyptus grandis
EAIVLPPFVAIAVRPRPGVWEYVRVNVHELSVEQLTVSEYLGFKEELVDGKSEDSFVLELD

SEQ ID NO: 98 - protein, 217 aa, Pinus radiata
CVGIDPKANMVSARLTRSLSSRERVEDTLSEHRNQLAALFSRYVAQGKKVLQPHEILDGLAAVIGENDEHQNFRDGLFGNVLRSTQEAIIIPPWVVLAVRPRPGVWEFVRVNVDELAVEQLSVAEYLEFKEQLVDGSVKDNYVLELDLEPFNASFPRPTQPSSIGSGVQFLNRHLSSRLFRDHESMQPLLDFLRAHKYQGQRLMLNERIQSLTKLRS

SEQ ID NO: 99 - protein, 348 aa, Pinus radiata
GTKSWSSRACRSTLVDPKNSARDGIDVFDPKFNIVSPGADMQIYFPYTEKQHRLTTLHGTIEELLFSPEQTAEHMCALNDRKKPIIFSMARLDRVKNMTGLVEWFAKSKRLRELVNLVVVAGDIDPSKSKDREEVAEIEKMHRLVKEYNLNGQFRWICAQKNRVRNGELYRYICDTRGAFVQPALYEAFGLTVVEAMTCGLPTFATCNGGPAEIIVDGVSGFHIDPYHGVSATERIADFFEKCKTDPSHWEKISNGGLQRIYEKYTWQIYADRLMTLSGVYGFWKYVSKLERRETRRYLEMFYSLKYRNLVKTVPLAVEESVNGIEEKSTEFRWLHSCRSCRPRHFAQ

SEQ ID NO: 100 - protein, 139 aa, Pinus radiata
SNLETFLGRVPMVFNVVILSPHGYFGQANVLGMPDTGGQVVYILDQCRALENEMLLRIKQQGLDITPEIIVVTRLIPEAHGTTCNQRLEKISGTQHSRILRVPFRTEKGVVRDWVSRFDVWPYLERFSEDVTNEIAVEL

SEQ ID NO: 101 - protein, 68 aa, Pinus radiata
ILLLIVGIGIHIKAKENMVAAALTHALSSRERVEDMLSEHRNEIVSLLSRYVAEGKKILQPHQLLDGL

SEQ ID NO: 102 - protein, 70 aa, Eucalyptus grandis
MAAPKLGRIPSIRDRVEDTLAAHRNELVSLLSRYVAQGKGILQPHHLLDELENIISEDEGKSSLSDGPFS

SEQ ID NO: 103 - protein, 534 aa, Eucalyptus grandis
VLFTHLPPQKPNRISLLLFFIFHITTFLLLLLLLSVLSTFISIAVSLSDPELFFASPPMAAAATLSAPDAAKLSQLKSAVSGLGQISESEKNGFINLVSRYLSGEAQHVDWSKIQTPTDEIVVPYDSLAPTPQDPAATKSLLDKLVVLKLNGGLGTTMGCTGPKSVIEVRNGLTFLDLIVIQIENLNTKYGCNVPLLLMNSFNTHDDTLKIVEKYANSNIDIHTFNQSQYPRLVVEDFMPLPCKGQTGKDGWYPPGHGDVFASLMNSGKLDALLSQGKEYVFAANSDNLGAIVDLKILNHLMTNKNEYCMEVTPKTLADVKGGTLISYEGKVQLLEIAQVPDEHINEFKSIEKFKIFNTNNLWVNLKAIKRLVEAQALKMEIIPNPKEVDGIKVLQLETAAGAAIKFFDNAIGINVPRSRFLPVKATSDLLLVQSDLYTLVDGFVERNKARTNPSNPSIELGPEFKKVGNFLSRFKSIPSIIELDSLKVSGDVWFGTGITLKGKVTIAAKPGVKLEIPDGVVLENKEIHGPEDL

SEQ ID NO: 104 - protein, 480 aa, Pinus radiata
MAAAPAVASPAAETDRIPKLQAEVTKLNQISDNEKEGFVRLVSRYLSGEEEKIEWEKIKTPTDEIVVPYDTLAALGEDPSETKELLDKLVVLKLNGGLGTTMGCTGPKSVIEVRNGLTFLDLIVKQIESLNNKYDSKVPLVLMNSFNTHDDTIKIVEKYSGSNIDIHIFNQSQYPRMVAEDLTPWPTKGRTDKEAWYPPGHGDVFPALLNSGKLDELLSQGKEYVFIANSDNLGAIVDLKILNHLVKNKNEYCMEVTPKTLADVKGGTLISYEGRVQLLEIAQVPEEHVGEFKSIEKFKIFNTNNLWVNLKAIKRLVEADALKMEIIPNPKEVDGVKVLQLETAAGAAIRFFDRAIGVNVPRSRFLPVKATSDLLLVQSDLYTVEEGFVIRNPARVNPTNPTIELGPEFKKVGNFLKRFKSIPSIIDLDSLKVSGDVWFGSGVILKGKVIIEAKQGATLEIPDESVIENKVVSSPDDIVN

SEQ ID NO: 105 - DNA, 573 bp, Eucalyptus grandis
ctcactcgatctcgaaggccagaagggggaggccgagcctcttgctttttttcgtgtataaaagggcctcccccattcctcatttttcaccatcctccgttcgttcgttcccttccctttccattgttgcgtttaagccctccaattttcttttggcgtcccgtttttggggctcccttgaagatctcctcttcatttcgggatttcctgccttcgccgcgccatttgaagttctttttctgagagaagaatttagacatggctgatcgcatgctgactcgaagccacagccttcgcgagcgtttggacgagaccctctctgctcaccgcaacgatattgtggccttcctttcaagggttgaagccaagggcaaaggcatcttgcagcgccaccagatttttgctgagtttgaggccatctctgaggagagcagagcaaagcttcttgatggggcctttggtgaagtcctcaaatccactcaggaagcgattgtgtcgcctccatgggttgctcttgctgttcgtccaaggccgggcgtgtgggagcacatccgtgtgaacgtccatgcgctt

SEQ ID NO: 106 - protein, 105 aa, Eucalyptus grandis
MADRMLTRSHSLRERLDETLSAHRNDIVAFLSRVEAKGKGILQRHQIFAEFEAISEESRAKLLDGAFGEVLKSTQEAIVSPPWVALAVRPRPGVWEHIRVNVHAL

SEQ ID NO: 107 - DNA, 664 bp, Eucalyptus grandis
ggcacgagctcttctcgtctcgctttctcatataaagaagtgaaagaatacgaggatactccacttgggtatcgccaagaactcattgggtcgcgagaagattggccaacatgatggaatccggggttcccctgtgcaacacttgcggagaggctgttggggttgatgagaaaggcgaggtcttcgtggcttgtcaagagtgcaacttcgccatttgcaaggcttgtgtcgaatatgagattaaggaaggaagaaaagcgtgcttgcgctgtggcactccatttgaagcgaactcgatggctgatgctgagagaaatgaattgggaagtcgatcgacaatggcagctcaactcaatgatcctcaggacacagggattcatgctagacacatcagcagtgtttctacgttggatagtgaatacaatgatgagactgggaaccctatctggaagaatagagtggagagctggaaggacaaaaagaataagaagaagaaggccccgacgaaggctgagaaagaggctcaagttccaccagagcagcagatggaagagaagcaaattgctgatgcttcagagccactctcgaccgttattcccattgccaaaagcaaactcgcaccataccgaaccgtaataataatgcgattgatcattttggcact

SEQ ID NO: 108 - protein, 184 aa, Eucalyptus grandis
MMESGVPLCNTCGEAVGVDEKGEVFVACQECNFAICKACVEYEIKEGRKACLRCGTPFEANSMADAERNELGSRSTMAAQLNDPQDTGIHARHISSVSTLDSEYNDETGNPIWKNRVESWKDKKNKKKKAPTKAEKEAQVPPEQQMEEKQIADASEPLSTVIPIAKSKLAPYRTVIIMRLIILA

SEQ ID NO: 109 - DNA, 1293 bp, Pinus radiata
ctgactctctctctctctgttttgtctcctccctcctctctctcgttttcgcttcgtcgtgaacgcacccacacgatcttccattccctcaacaatgtcgactctcaccgtcccgcagccactgccccctgtagccgatgactgcgagcagctccggacagccttcgcaggatggggaacaaatgagaagctgatcatatccatattgggtcataggaatgcggcgcagaggaagctgattcggcaaacctatgccgagacttacggcgaggacctcctcaaggcattggacagagaacttaccaatgatttcgagaggctggtggtcctttggtcacttgatccggctgaacgtgatgcgtacttggcgaatgaagcgacgaaaagatggacttcaagcaaccaggttctcatggaaatagcctgcacgaggtctccgcagcagttgcttatggcaagacaagcatatcatgcccgatacaagaagtcaatggaagaggacgtcgctcaccacacaactggagattttcgtaagttgctggtacctcttgggagctcctaccgtaatgatggagatgaggtgaatatgactttggcaaaagcagaggctaagatactccacgagaagatctcagagaaggcttatggccatgaggatctcataaggattttggctactaggagcaaagcacaggtcaatgctacgctgaatcactacaaaaatgagtttggaaatgatatcaacaaggatttgaaaactgatccaaaagacgcgttccttactatactgagagctacagtaaagtgcctgactcgccctgagaagtattttgaaaaggttcttcgtctagccatcaataagcgaggaacagatgaaggggctctgaccagagtagttgctaccagggccgaggttgacatgaagtttataagtgaggagtaccagaggaggaatagcatccctctcgatcgtgccattgtcaaggacactactggagactatgaaaaaatgcttctggcattgattggccacgtcgaggcttgatttacaagtactcatgaagctatcctggtggaggcaatatctctgtttttggtgtggtttgaggcatttctattttccttgctttccaacaacgtgtagttaccaacatgcctccccagttgtcagttgtagctatgcgaagcaaatacacttcttataatggcgttggtttatgtacttatgagaagtctttgattttgatctttaatcaagactgctagtaagtgatcgtgaaaaaaaaaaaaaaa

SEQ ID NO: 110 - DNA, 484 bp, Pinus radiata
ggaagctgattcggcaaacctatgccgagacttacggcgaggacctcctcaaggcattggacagagaacttaccaatgattttgaggtctgatcttctttaattatttgtattcatcccatggagacgcgtccctctttctctcagattaatccatattcattccgtatcgtcagaggctggtggtcctttggtcgcttgatccggctgaacgtgatgcgtacttggcgaatgaagcgacgaaaagatggacttcaagcaaccaggttctcatggaaatagcctgcacgaggtctccacagcagttgctcatggcaagacaagcatatcatgctcgatacaagaagtcgctggaagaggacgtcgctcaccacacaactggagattttcgtaagttgctggtacctcttgtgagctcctaccattatgatggagatgaggtgaatatgactttggcaaaagcagaggctaagatactccacgag

SEQ ID NO: 111 - DNA, 221 bp, Pinus radiata
cgtacttggcgaatgaagcgacgaaaagatggacttcaagcaaccaggttctaatggaaatagcctgcacgaggtctccgcagcagttgcttatggcaagacaagcatatcatgcccgatacaagaagtcgctggaagaggacgtcggtcaccacacaactggagattttcgtaagttgctggtacctcttgtgagctcctaccgttatgatggagatgag

SEQ ID NO: 112 - DNA, 789 bp, Pinus radiata; identical to SEQ ID NO: 26

SEQ ID NO: 113 - DNA, 704 bp, Pinus radiata
gttttgttgagctactagattttagtaaatcaagaattcatcagctataaattgaggcattcgatttcagttttagttacattttggtgaagttggtcgacctgcattgctgaagatatcgtgcgaagtatgtgatttgtcgagaagatgtcaacaattatagtgccagttccaataccgaccccatctgaagactctgaacgcctgaggaaggcttttgaagggtggggcacaaatgagaagtcaatcatacaaatattaggacatagaactgcagcacaacgcaaagtaatccgtcaaagttattttcaactgtacgaagaggatctcttgaagcgattagaatctgagctttcaagtgactttgagaaagctgtattcctttgggtactagatccagctgaacgtgatgcggtcatatctcatggtgcaataaagaagtggaatgcaaagaatatatcgcttttagaaatttccagtgctcgatcttcggctgaactattgatggtgaggcaagcatatcatattcggtacaaaaagtccctcgaagaagacgtggctgcacatacaagtggaaacttccgtaagttgctggtagcacttgtaagttcatatcggtatgaaggtccggaagtggatatgcatttggcaagttatgaagcaaagaagctaagtgaatctataaccgagcaaaaaagataatt

SEQ ID NO: 114 - protein, 316 aa, Pinus radiata
MSTLTVPQPLPPVADDCEQLRTAFAGWGTNEKLIISILGHRNAAQRKLIRQTYAETYGEDLLKALDRELTNDFERLVVLWSLDPAERDAYLANEATKRWTSSNQVLMEIACTRSPQQLLMARQAYHARYKKSMEEDVAHHTTGDFRKLLVPLGSSYRNDGDEVNMTLAKAEAKILHEKISEKAYGHEDLIRILATRSKAQVNATLNHYKNEFGNDINKDLKTDPKDAFLTILRATVKCLTRPEKYFEKVLRLAINKRGTDEGALTRVVATRAEVDMKFISEEYQRRNSIPLDRAIVKDTTGDYEKMLLALIGHVEA

SEQ ID NO: 115 - protein, 111 aa, Pinus radiata
SIFIPYRQRLVVLWSLDPAERDAYLANEATKRWTSSNQVLMEIACTRSPQQLLMARQAYHARYKKSLEEDVAHHTTGDFRKLLVPLVSSYHYDGDEVNMTLAKAEAKILHE

SEQ ID NO: 116 - protein, 73 aa, Pinus radiata
YLANEATKRWTSSNQVLMEIACTRSPQQLLMARQAYHARYKKSLEEDVGHHTTGDFRKLLVPLVSSYRYDGDE

SEQ ID NO: 117 - protein, 239 aa, Pinus radiata; identical to SEQ ID NO: 54

SEQ ID NO: 118 - protein, 184 aa, Pinus radiata
MSTIIVPVPIPTPSEDSERLRKAFEGWGTNEKSIIQILGHRTAAQRKVIRQSYFQLYEEDLLKRLESELSSDFEKAVFLWVLDPAERDAVISHGAIKKWNAKNISLLEISSARSSAELLMVRQAYHIRYKKSLEEDVAAHTSGNFRKLLVALVSSYRYEGPEVDMHLASYEAKKLSESITEQKR

SEQ ID NO: 119 - DNA, 568 bp, Eucalyptus grandis
tcgtcacccaattcctcaccaacaacaaccgagcctctggcacactttcctccatcaggaggttctacgtccaggacggcaaagtaattccaaactctatggtaaacctctccggtcttcccaaagtcaactcgatcacgtcagattactgcaccgctaaaatggacgttctcgacgattctaccgctttcaacgtacatggtggtcttgcaaagatgggtaaatcccttgcacgaggagcagtactcgtggtcagtctctgggatgatcttggcggcgggatgacttggttggatggtctagcaggggatgcatctgcccctgggaccctccgtggaccgtgcaccgctgcgaatgtaacatcagatccggctacctccgtcactttctcgaatatccgagttggcgatatcaatagcactttctctcaggtgcactttgggcaatgtggaggtcaattttacgaggggccagctctttgcgcagacccattcgagtgtgtcttcagtaatccgtattacagccagtgtctataagatattgaatataacacggtttatgtccttcc

SEQ ID NO: 120 - DNA, 360 bp, Eucalyptus grandis
cgacatgttcgacaaggccgctctcttcgctttctctttactcgccgtcacttacggtcagcaggtcggtacccagactgctgaatctcatccgcctcttacctggcaaaaatgtacgactgctggtggatgtaccaatgtttctggtggtagtgttgtcattgacgcgaattggcgttgggtccattccatcaacggtactactaactgttacactggtcaagcatggaacacgacactctgtccggatgacacgacttgcgcagccaactgcgctttggatggtgctgattactctggcacttatggcattactacttccggcaatgctcttaccctcaagttcgtcactcaatcttc

SEQ ID NO: 121 - DNA, 375 bp, Eucalyptus grandis
tattatgatgcgaatttaattgctatagcagttgggtttagcaggacaatttacagtgtgattcctcaatggagccgtttgataggtggggtcttcttcagtttttgggtcttggctcatctgtatccttttgcaaaggggctcatgggaagacgtgggcgcacccctaccattgttttcgtttggtcaggactcattgcaatcaccatatcacttctttgggtggcaatcagccccccagctgggtcaacccaaatcggtggctctttccagttcccctgataggttattctttttaatatgctttatctgtttagtgacattactccattcttttttaaatgagatgatcatgttgacaaaaaaaaaaaaaaa

SEQ ID NO: 122 - DNA, 590 bp, Eucalyptus grandis
cacgactttggaagatggtggtgttccgccagatgctagtcctgcatcgctactaaaagaagccatccaagtcatcagttgcggatatgaagacaagacagaatggggaaaagaagttggctggatatacggttcggtgactgaggatatattgactgggttcaaaatgcactgccacggctggagatcggtgtactgtatacctaagaggcctgcattcaagggttcagcaccgatcaacctttcggatcgtctacaccaggttctccggtgggctcttgggtcagttgagattttcttgagcaggcattgcccaatctggtatggctacgggggaggtttgaagtggttggaacgattttcttacatcaattcggttgtgtatccttggacctccatccccttgattgtttactgctcactcccggctatctgccttctcactggccaattcatcgtgcctgagattagcaactatgcaagtctcgtctttatggcacttttcatctccattgctgcgactggtattcttgagatgcaatggggtggtgttggaatcgatgactggtggagaaacgagcagttttggg

SEQ ID NO: 123 - DNA, 590 bp, Eucalyptus grandis
cactgcactgattcctaagaagttcggaaactcatacatgttcattgattccatacctttagctgagttccaaggccgaccccttgccgaccatccatccgtgaaaaatggacggcctcctggtgctctcactgttcttcgacggcttcttgatgcgtcaacagttgcagaggcaataagtgccatctcatgctggtacgaagataaaactgagtggggggaacgagtagggtggatttacgggtccgtcacagaggatgtcgtgacagggtatagaatgcacaatcgaggatggacatctgtatactgcgtgaccaagagagatgcttttcgtgggaccgcacccatcaatctcaccgatcggcttcatcaagtcctgcgctgggcgacgggctcggtggagatattcttctctcgcaacaatgccataatggccagcggcaggctgaagttccttcagaggattgcttacctcaacgttggaatttaccctttcacttccatctttcttattgtctactgctttctcccggcgctctctctattctctgggaagttcattgtgcaatcgctcagtgtatccttcctaa

SEQ ID NO: 124 - DNA, 619 bp, Eucalyptus grandis
ggaaagggtggtgacaagaattacatcgacaagaagagagctggcaaaagaactgaatccaacattccaatattcaacatggaggatattgaggaggggatggaaggttatgatgatgagagatcactgcttatgtcccagaaaagcttagagaagcgctttggtcaatcgccagtcttcattgcagcaacattcatggaacagggagggcttccaccatctactaatccagcaactcttttgaaggaagcaattcatgttatcagctgtggctatgaggacaagactgagtggggcaaagagattggatggatatacggttctgtcacagaagatatcttaacagggtttaagatgcatgctcgaggttggatctccatttactgtatgcctccacgcccagcattcaagggttccgctcccataaatctttcagatcgtctgaaccaagttcttcgatgggcattggggtccattgagattttactaagcaggcattgtcctatatggtatggttacaatgggagactgaagtggttggagagattggcatatataaataccattgtgtatcccctcacttcaatcctcttgattgcttattgcattctgcctgcat

SEQ ID NO: 125 - DNA, 429 bp, Eucalyptus grandis
cgtcctcttagccccttgcccagcagttgcaagtccatcattcatcatcatgctcctccagactggcgtcttcctcgccacgctcctgggcaccgcccatgcccaggccgtaggcaaggagcagaccgagactcaccccaagatgacatggaagaagtgcagtagcggtggcagctgcactagcgtgaacggtgaagtcaccatcgacgccaattggcgctggctgcacgggacgtcagacaccaagaactgctacgatggcaacaagtggaccgacaagtgcagcagcgcgactgactgcgcctccaagtgcgccatcgaaggtgccacctattccaagacatacggtgcctccactagcggtgatgccctgactctcaagttcgtcaccaagcacgaatatggtaccaatatcggctctcgtctcta

SEQ ID NO: 126 - DNA, 534 bp, Eucalyptus grandis
ctggaatcatcctttatttctgtgactgtgcactttcagagaggaaggagagagaggaaacccaaaagaaaaggttgtggcttgcagctgaatcaataccacacacccatatatacaatactcccacactattccctttttttcttccttcattaattttatctctcttcattttgtaatttagatatttccaaacaaaagtctgtctctttttttcttttattattatcatttgttccgactccgatttgccgtttgagagaagttacctctgttatggactgtggatctccgagaaccaagctgtcctgagttgaccctgttgcttctttaaccccactcaaccgatctgtcaagattgtagcctctgtgttccgacaaatgaataccggtggtcggttaatcgccggttcacacaacaggaacgagtttgttcttattaatgccgatgagaatgccagaataagatcagtgcaagagctgagtgggcagacgtgtcaaatctgtagagacgagattgaattgaccgtcgat

SEQ ID NO: 127 - DNA, 450 bp, Eucalyptus grandis
aaagcactgagtgagagctggaactgaagtgactgactgatgttagagagagagagaattgagatagagatggagtgacgaggaagcctcccctcccttcttcaccaaacgttcgctctctcccgctccacacctccttcgctgctgccccctccattgcgtagcaccgtcgccgccgctcgccgccgatctcctcttctccgagacccggaatcgcgaaccgcttgtcgagcaccgcgatcgcccccgagcgagcgagagcgagagcgagagcgagaggggaggacatggaagcgaatgccgggatggtggccggatcctacaagcggaacgagctggtccggatacgccacgactccgacagcgcgcccaagcccctgaagcacttggatggccagatgtgtcagatttgtggtgataccgttggactttcggccagtggtgatgtgt

SEQ ID NO: 128 - DNA, 302 bp, Eucalyptus grandis
tcttgtccaggtttactcaaggttttaggtggagtcaacacaaacttcaccgtcacctcaaaagcagcggatgatggagcattctcagaactctatatctttaaatggacatcgctgttgatcccgcccatgactctcctgatcatgaacattgtatggaggctgttggcgggatctccgatgccatcaataatgggtatgattcgtggggtcccctctttggtaggctatttttcgccttctgggtcgcgtccatctctacccattcctaagggattgctcgggaagcaagaccggatgcc

SEQ ID NO: 129 - protein, 177 aa, Eucalyptus grandis
VTQFLTNNNRASGTLSSIRRFYVQDGKVIPNSMVNLSGLPKVNSITSDYCTAKMDVLDDSTAFNVHGGLAKMGKSLARGAVLVVSLWDDLGGGMTWLDGLAGDASAPGTLRGPCTAANVTSDPATSVTFSNIRVGDINSTFSQVHFGQCGGQFYEGPALCADPFECVFSNPYYSQCL

SEQ ID NO: 130 - protein, 118 aa, Eucalyptus grandis
MFDKAALFAFSLLAVTYGQQVGTQTAESHPPLTWQKCTTAGGCTNVSGGSVVIDANWRWVHSINGTTNCYTGQAWNTTLCPDDTTCAANCALDGADYSGTYGITTSGNALTLKFVTQS

SEQ ID NO: 131 - protein, 93 aa, Eucalyptus grandis
YYDANLIAIAVGFSRTIYSVIPQWSRLIGGVFFSFWVLAHLYPFAKGLMGRRGRTPTIVFVWSGLIAITISLLWVAISPPAGSTQIGGSFQFP

SEQ ID NO: 132 - protein, 196 aa, Eucalyptus grandis
TTLEDGGVPPDASPASLLKEAIQVISCGYEDKTEWGKEVGWIYGSVTEDILTGFKMHCHGWRSVYCIPKRPAFKGSAPINLSDRLHQVLRWALGSVEIFLSRHCPIWYGYGGGLKWLERFSYINSVVYPWTSIPLIVYCSLPAICLLTGQFIVPEISNYASLVFMALFISIAATGILEMQWGGVGIDDWWRNEQFW

SEQ ID NO: 133 - protein, 196 aa, Eucalyptus grandis
TALIPKKFGNSYMFIDSIPLAEFQGRPLADHPSVKNGRPPGALTVLRRLLDASTVAEAISAISCWYEDKTEWGERVGWIYGSVTEDVVTGYRMHNRGWTSVYCVTKRDAFRGTAPINLTDRLHQVLRWATGSVEIFFSRNNAIMASGRLKFLQRIAYLNVGIYPFTSIFLIVYCFLPALSLFSGKFIVQSLSVSFL

SEQ ID NO: 134 - protein, 206 aa, Eucalyptus grandis
GKGGDKNYIDKKRAGKRTESNIPIFNMEDIEEGMEGYDDERSLLMSQKSLEKRFGQSPVFIAATFMEQGGLPPSTNPATLLKEAIHVISCGYEDKTEWGKEIGWIYGSVTEDILTGFKMHARGWISIYCMPPRPAFKGSAPINLSDRLNQVLRWALGSIEILLSRHCPIWYGYNGRLKWLERLAYINTIVYPLTSILLIAYCILPA

SEQ ID NO: 135 - protein, 126 aa, Eucalyptus grandis
MLLQTGVFLATLLGTAHAQAVGKEQTETHPKMTWKKCSSGGSCTSVNGEVTIDANWRWLHGTSDTKNCYDGNKWTDKCSSATDCASKCAIEGATYSKTYGASTSGDALTLKFVTKHEYGTNIGSRL

SEQ ID NO: 136 - protein, 51 aa, Eucalyptus grandis
MNTGGRLIAGSHNRNEFVLINADENARIRSVQELSGQTCQICRDEIELTVD

SEQ ID NO: 137 - protein, 54 aa, Eucalyptus grandis
MEANAGMVAGSYKRNELVRIRHDSDSAPKPLKHLDGQMCQICGDTVGLSASGDV

SEQ ID NO: 138 - protein, 100 aa, Eucalyptus grandis
SCPGLLKVLGGVNTNFTVTSKAADDGAFSELYIFKWTSLLIPPMTLLIMNIVWRLLAGSPMPSIMGMIRGVPSLVGYFSPSGSRPSLPIPKGLLGKQDRM

SEQ ID NO: 139 - DNA, 2906 bp, Eucalyptus grandis
gggaggccgagcctcttgctttttttcgtgtataaaagggcctcccccattcctcatttttcaccatcctccgttcgttcgttcccttccctttccattgttgcgtttaagccctccaattttcttttggcgtcccgtttttggggctcccttgaagatctcctcttcatttcgggatttcctgccttcgccgcgccatttgaagttctttttctgagagaagaatttagacatggctgatcgcatgctgactcgaagccacagccttcgcgagcgtttggacgagaccctctctgctcaccgcaacgatattgtggccttcctttcaagggttgaagccaagggcaaaggcatcttgcagcgccaccagatttttgctgagtttgaggccatctctgaggagagcagagcaaagcttcttgatggggcctttggtgaagtcctcaaatccactcaggaagcgattgtgtcgcctccatgggttgctcttgctgttcgtccaaggccgggcgtgtgggagcacatccgtgtgaacgtccatgcgcttgttcttgagcaattggaggttgctgagtatctgcacttcaaagaagagcttgctgatggaagcttgaatggtaactttgtgcttgagcttgactttgagccattcactgcctcttttccgcgcccgactctttccaagtctattggcaatggcgtcgagtttctcaatcgccatctctccgctaagctcttccatgacaaggaaagcttgcaccctctgcttgaattcctccaagtccactgctacaaggggaagaacatgatggtgaatgccagaatccagaatgtgttctccctccaacatgtcctgaggaaggcggaggagtatctgacctcgctcaaacccgagaccccgtactcccagttcgagcacaagttccaggagatcgggctcgagcgggggtggggtgacacggctgagcgcgtcctcgagatgatccagctcctgttggatctccttgaggctcccgacccgtgcactctcgagaagttcttggatagggttcccatggtcttcaacgtcgtgatcatgtctccccacggatactttgctcaggacgacgtccttggttatccggataccggtggccaggttgtttacatcctggatcaagttcgtgccctagaggaagaaatgcttcaccgcattaagcaacaaggactggatattactcctcggattctcattatcactcggcttcttccagacgcggttggaaccacctgtggccagcgccttgagaaagtttttgggaccgagtactcccacattcttcgcgtccccttcagaaatgagaagggagtcgtccgcaagtggatttcccggttcgaggtgtggccctatttggaaagatacactgaggatgtcgcgagcgaacttgctggagagttgcagggcaagcctgatctgatcatcggaaactacagtgatggaaacattgttgcttccttgttagcacataaattaggtgttacacagtgtacaatagcccatgccctcgagaagacgaagtacccagagtcagacatatactggaagaaatttgaggaaaagtaccacttctcttgccagttcactgctgatctcatcgccatgaaccacaccgacttcattatcaccagcaccttccaagaaattgctggaagcaaggatacagtggggcagtatgagagtcacatgaacttcactcttcctggactctaccgagttgtccacgggatcgacgtcttcgacccgaagttcaacattgtttcaccaggtgctgacatgagcatctactttgcttacaccgaacaggagcggcggttgaaatccttccaccctgagatcgaggaactcctcttcagcgatgttgagaacaaggaacacttgtgtgtgttgaaagataagaagaagcctattattttcaccatggcaaggctggaccgtgtcaagaacttgacagggcttgttgagtggtatggcaagaactccaagttgagggaactcgccaacttggtcgtggttggaggtgacaggaggaaggattcgaaggacttggaagagcagtctgagatgaagaaaatgtacgacctcatcgaaaagtacaagctgaatggccagttcaggtggatttcctcccagatgaaccgggtgaggaatggagagctctaccgctacatctgtgacacgaagggagtcttcgttcaaccggctatctatgaagctttcgggttgaccgtggttgaggccatgacttgtggattgccaacctttgccacttgcaatggtggaccagctgagatcattgtgcatggcaaatcgggctaccacattgatccttaccatggtgaccaggcggccgagcttcttgtagacttcttcaacaagtgcaagattgaccagtcccactgggacgagatctcaaagggtgccatgcagagaattgaagagaagtatacatggaaaatatattctgagaggctgttgaacctgactgccgtgtatggcttctggaagcatgtgactaaccttgatcggcgcgagagtcgccggtaccttgaaatgttctatgccctcaagtatcgcccactggcacagtctgttcctccggctgtcgagtaaacaaagagacagattgttaccagaagacggaagcattggacttttgaagttttcaaggaataaacattggaaattgtttgaatttgggattgccaagagcgatctttttcgtttcctttttttggtcctttttctcttctttgtttccattccgcgaatgtttgcattttggggtttgtacccatcaattcagtaaatggttcattttcttttcaaattgtccgtgccgctccgtatttcgtactaaaaaaaaaaa

SEQ ID NO: 140 - DNA, 1592 bp, Pinus radiata
ggccaaggaaacttgactactccatcaatttgtttacagttttcgaaaaatgggctatccagttcaggaggtatccaaggaacacgatcaatgggcaggatttgttgaaggtgaaagtgtgcttcaaagaggaagggagattcttctccagggttttaactgggagtcacataaatacaagtggtggccaaatttggaagaaaagatcccgcacattgctaaagcaggatttacatctgtatggctgccacctgcttttgattctgctgcaccccaaggttacttgccccgaaacatttattctctgaactctgcatatggttcagaatatcagctgaaaagcttacttatgacaatgcgaaagaaaaatgtgagagccatggctgacatagttatcaatcatcgcatgggaagctctcaggggtttggaggcttgtataatcgctatgatggcttgccactgccttgggatgaacgtgctgttacacgttgttctggtggacttggaaactggagcacaggggataattttcatggagtaccaaacgttgatcacacccaagattttgtacgcaaagacatcaaagattggttaaggtggcttcggaaaagtgttggttttcaagattttcgatttgactttgccaagggttatgcagcaaaatttgtgaaagaatatattgaggcatcgacccccatgtttgctgttggggaatattgggattcgtgcaattatactcctcctagctatcatcttgataagaaccaagatagccatagacaaagaataatcaattggattgatggcactagtggcatctctgcggcatttgattttacaacaaagggcattcttcaggaggcagtgaaaggacaatgttggcgtttacgtgatcaccagggaaagcctcctggagtgcttggctggtggcctccaaggctggtacttttaaatgaaaaccatgacactggatcaacacagggtcattggccttttccatgtgatcatattatggagggctatgcgtacatcttgacacaccctggaataccagcagtcttctatgaccatttttttgattggggaagctcaatacaaaacgagattataaagctgatgagaattcggagaacacaagatttaaacagccgctcttcaatagagattttagaggccagttcaactgtttatgctgcaattattggaaggaaagtttgcatgaagattggagatggctcatggtgtccgaatggcagggagtggcagctagctacttgtggtcatagatatgctgtttggcacaagtaacattgtttttgcatgtatttctagtggctagatagtagtgtcttgtagtgaatttatttctagtggctagatactagtatcgtgtagtgaattaatgtatctctattttcaaccgtggaaatgagatgcatgggtacgatatacagattatataaaattttctacacggctatagacctactctagaggtctatgttatgagcacatctacgttgaaatttttatcctggtcttgaataaagagcatggaatcattatgtgtgtacataaaaaaaaaaaaaaa

SEQ ID NO: 141 - DNA, 3747 bp, Eucalyptus grandis
cggggatttccaagtctccaccccattgacgtcaatgggagtttgttttggcaccaaaatcaacgggactttccaaaatgtcgtaacaactccgccccattgacgcaaatgggcggtaggcgtgtacggtgggaggtctatataagcagagctggtttagtgaaccgtcagatccgctagccgcaattactgtgagttagctcactcattaggcaccccaggctttacactttatacttccggctcggtatattgtgtggaattgtgagcggataacaatttcacacaggaaacagctatgaccttgattacgccaagctcgaaattaaccctcactaaagggaacaaaagctggagctcgcgcgcctgcaggtcgacactagtggatccaaagaattcgggcacgagctcttctcgtctcgctttctcatataaagaagtgaaagaatacgaggatactccacttgggtatcgccaagaactcattgggtcgcgagaagattggccaacatgatggaatccggggttcccctgtgcaacacttgcggagaggctgttggggttgatgagaaaggcgaggtcttcgtggcttgtcaagagtgcaacttcgccatttgcaaggcttgtgtcgaatatgagattaaggaaggaagaaaagcgtgcttgcgctgtggcactccatttgaagcgaactcgatggctgatgctgagagaaatgaattgggaagtcgatcgacaatggcagctcaactcaatgatcctcaggacacagggattcatgctagacacatcagcagtgtttctacgttggatagtgaatacaatgatgagactgggaaccctatctggaagaatagagtggagagctggaaggacaaaaagaataagaagaagaaggccccgacgaaggctgagaaagaggctcaagttccaccagagcagcagatggaagagaagcaaattgctgatgcttcagagccactctcgaccgttattcccattgccaaaagcaaactcgcaccataccgaaccgtaataataatgcgattgatcattttggcacttttcttccattaccgagtgacacatccagtcgacagcgcctatccattgtggcttacatccatcatatgtgagatttggttcgcatactcatgggtgttggatcagttcccgaagtggtctcccgtgaataggattactcatgttgacagactatctgcaaggtatgaaaaagaaggtgaaccttcagagcttgctgctgtcgacttcttcgtgagtacagtcgatccaatgaaagaaccacctttgatcactgccaatacagtgctttccatccttgctgtggactatcctgttgataaagtctcttgttatctttctgatgatggtgctgcgatgctctcattcgagtctcttgttgaaacggccgactttgcaagaaagtgggtacctttctgcaaaaagtattcgattgagccccgtgcgcctgagttctacttttctcagaagattgactacttgaaggataaaattcagccttcttttgtgaaggaacgaagagcaatgaaaagagactatgaggagttcaaagttcgagttaatgctttggtagcaaaagcgcagaaagcgccggaggaaggttggtctatgcaggatgggacaccttggcctggaaataactctcgtgaccaccctggaatgattcaggttttcctcggaagtagtggagcccacgacatcgagggaaatgaacttcctcggctggtgtatgtttccagagagaagagacccggtttccaacatcataaaaaggccggagcggaaaatgctctggtgagagtatctgcaattctgacaaatgctccgtacatcctcaaccttgactgcgatcattatgtcaactatagtaatgctgttcgtgaagcaatgtgcttcctgatggatcctcaagttggtagaaatttgtgctatgtgcagttccctcagagatttgatggtatcgatcgcagtgatcgatatgccaaccgaaataccgttttctttgatgttaacatgaaagggctggatggaatccaaggaccagtttatgtcgggacaggatgtgttttcaataggcaagcactttacggatacggacccccttctatgccgaatttaccaaagccctcctcatcatgctcctggtgtggctgctgctcttgttgctgcccttcaaagaagcccactaaagatctctcagaagtttaccgagactcaaaaagggaagacctaaatgccgccatcttcaaccttggagagattgacaattatgatgagcatgagagatcaatgctgatctctcagatgagctttgagaaaacttttggcttgtccactgtgtttattgagtcgacgctgttggcaaatggaggagttcctgaatctgcccatccgtctatgctgatcaaagaagccattcatgtcattagctgtggctatgaagagaagaccgcatggggcaaagagatcggttggatatatggctcggttactgaggatatcttaacagggttcaagatgcactgcagaggatggaggtcggtctattgcatgcccttaaggcctgcattcaagggatcagcgcccattaatttgtcagacagactgcaccaagttctccgatgggctctgggttccgtggaaatattcttgagtagacattgtccactttggtatggatttggcggaggccgcctcaagtggcttcaaagattggcgtacataaacaccatcgtttatccattcacatccctccctcttgtcgcttattgcacaattcctgcgatctgcctccttactggaaagttcatcattccaacgctttccaacttggcaagcgtgctatttcttggtcttttcctctccatcatcgtcacaagtgtgctcgagctgcgatggagtggcgtgagcattgaggactggtggcgtaacgagcagttctgggtgattggaggtgtctcagcccatctctttgccgtcttccaaggattcctgaagatgttagctggcctagacaccaacttcaccgtcactaccaaagcagccgacgacgcggagtttggtgagctctacatgatcaagtggacgacgctgctgatacccccgaccactcttctcatcgtgaacatggtgggtgtcgttgccgggttctccgatgcgctgaacaaaggttatgaggcgtggggacccctctttggcaaggtcttctttgcattctgggtgattcttcatctctatccattcctgaaaggtctcatgggtaggcagaacaggactccgaccattgtggttctctggtcggtgttctggcttctgtcttctctctcgtctgggtgaagatcgatccattcgtgagcaaatccgatgctgacctctcccagagctgcagttctatagattgttgaattgcgcgagtgttggcttgtgtttatcaaggatctcaagctgtttttgcagttttgcgcctcttgaagattggggaaataccgagtttatgatgttggaaatttgctaaagaaagggtgattattgtattcatgaattgatatgtagaggcgagacatttttcctcactatcccaaaaattcctggctttgtgtacttgtaaaatggtacgagaaagaaagagtattccctgtatttcttgaacaatttaacattagaatgtgcgatgcatggtgatcaaaatctaaaaaaaaaaaaaaa

SEQ ID NO: 142 - DNA, 770 bp, Eucalyptus grandis
ggttaaaggatgcaataatttcccacggttgctttttgagagagtgccgcgttgaacgctccatagtgggtgaacgctcgcgcctcgattctggagttgagctgaaggacacggtgatgatgggtgcagactattaccaaacagaatctgaaatagcttctctgttagcggaggggaaggtgcctattgggatagggaagaacacaaagataaggaactgcataattgacaagaacgcgaagattgggaaagatgtggccattgtaaacaaagatggcgttgaagaagcagatcggccaggggatgggttttacatacgcttgggaataaccgtgatactggagaaggcaaccatagaagatggtacagttatataagcggatggatttcgagtcaatcaacagttgtttccaagatgaaaaaaatactccgagaagagacctaggcatggagatcgaacaagttatacatagttttcaagcagttctcggagagttgctgagcacctttctgctgtatgtacaaaaatacttatccctagtcctgtccatagtattataggacaagcctactagagtctgagttcccacaatataactgcttcttagtttgtaaataaggtaatctgcgagatttgaataaactttgccggttgtatcgaactttcgatactatcctggtgatgatgtcttgtgaaactaatgggctattgtttaagtaaccggcagttttctgtcaacatctcttttgatttaaaaaaaaaaaaaaaa

SEQ ID NO: 143 - DNA, 543 bp, Pinus radiata
ggacaccatctctaatggaggtctacagcgtatctatgaaaggtatacatggaagatttatgctgagaaattaatgacgttggctggagtttatggcttttggaagtatgtctcaaaactggaaagacgagagtcattccgctatcttgagatgttttacatcttgaagtacagaaatctggttaaaactgtgccattttctgttgaagaaagcaccgatggtattgaagagaagagtgcataattgcctaccggagatgtgccatccaagggagcttctgccttggtttataagaattgagtgccttagctactcccctggtaaataaacactgagtggcacattgatactatgtaatgaccatattctcgtaacgccatctcgttttctcccatatttcttggtcctggggttgctgtttatatttgtattaggcgatatgaacatattccgttggaatacaaagcctggaacatattttgtatattaaaatattagtaattaaagccaatgtgctccattgtaaaaaaaaaaaaaaaaaa

SEQ ID NO: 144 - protein, 805 aa, Eucalyptus grandis; identical to SEQ ID NO: 44

SEQ ID NO: 145 - protein, 419 aa, Pinus radiata
MGYPVQEVSKEHDQWAGFVEGESVLQRGREILLQGFNWESHKYKWWPNLEEKIPHIAKAGFTSVWLPPAFDSAAPQGYLPRNIYSLNSAYGSEYQLKSLLMTMRKKNVRAMADIVINHRMGSSQGFGGLYNRYDGLPLPWDERAVTRCSGGLGNWSTGDNFHGVPNVDHTQDFVRKDIKDWLRWLRKSVGFQDFRFDFAKGYAAKFVKEYIEASTPMFAVGEYWDSCNYTPPSYHLDKNQDSHRQRIINWIDGTSGISAAFDFTTKGILQEAVKGQCWRLRDHQGKPPGVLGWWPPRLVLLNENHDTGSTQGHWPFPCDHIMEGYAYILTHPGIPAVFYDHFFDWGSSIQNEIIKLMRIRRTQDLNSRSSIEILEASSTVYAAIIGRKVCMKIGDGSWCPNGREWQLATCGHRYAVWHK

SEQ ID NO: 146 - protein, 955 aa, Eucalyptus grandis
MMESGVPLCNTCGEAVGVDEKGEVFVACQECNFAICKACVEYEIKEGRKACLRCGTPFEANSMADAERNELGSRSTMAAQLNDPQDTGIHARHISSVSTLDSEYNDETGNPIWKNRVESWKDKKNKKKKAPTKAEKEAQVPPEQQMEEKQIADASEPLSTVIPIAKSKLAPYRTVIIMRLIILALFFHYRVTHPVDSAYPLWLTSIICEIWFAYSWVLDQFPKWSPVNRITHVDRLSARYEKEGEPSELAAVDFFVSTVDPMKEPPLITANTVLSILAVDYPVDKVSCYLSDDGAAMLSFESLVETADFARKWVPFCKKYSIEPRAPEFYFSQKIDYLKDKIQPSFVKERRAMKRDYEEFKVRVNALVAKAQKAPEEGWSMQDGTPWPGNNSRDHPGMIQVFLGSSGAHDIEGNELPRLVYVSREKRPGFQHHKKAGAENALVRVSAILTNAPYILNLDCDHYVNYSNAVREAMCFLMDPQVGRNLCYVQFPQRFDGIDRSDRYANRNTVFFDVNMKGLDGIQGPVYVGTGCVFNRQALYGYGPPSMPNLPKPSSSCSWCGCCSCCCPSKKPTKDLSEVYRDSKREDLNAAIFNLGEIDNYDEHERSMLISQMSFEKTFGLSTVFIESTLLANGGVPESAHPSMLIKEAIHVISCGYEEKTAWGKEIGWIYGSVTEDILTGFKMHCRGWRSVYCMPLRPAFKGSAPINLSDRLHQVLRWALGSVEIFLSRHCPLWYGFGGGRLKWLQRLAYINTIVYPFTSLPLVAYCTIPAICLLTGKFIIPTLSNLASVLFLGLFLSIIVTSVLELRWSGVSIEDWWRNEQFWVIGGVSAHLFAVFQGFLKMLAGLDTNFTVTTKAADDAEFGELYMIKWTTLLIPPTTLLIVNMVGVVAGFSDALNKGYEAWGPLFGKVFFAFWVILHLYPFLKGLMGRQNRTPTIVVLWSVFWLLSSLSSG

SEQ ID NO: 147 - protein, 124 aa, Eucalyptus grandis; identical to SEQ ID NO: 32

SEQ ID NO: 148 - protein, 80 aa, Pinus radiata
DTISNGGLQRIYERYTWKIYAEKLMTLAGVYGFWKYVSKLERRESFRYLEMFYILKYRNLVKTVPFSVEESTDGIEEKSA

SEQ ID NO: 149 - DNA, 375 bp, Eucalyptus grandis
atccgctgggaggtttaggactgacatcagcgatctcatgacccaaattgttgagttcctagccaagaacagcgcacctctcaccgtcaacatttatccattcctgagtctctatggtaacgacaacttccccatcgactatgccttcttcgatggggccaccccagtcgtggacaacgggatacaatacacgaacgtgttcgatgccaacttcgacactctagtatcggctcttaaggcggtgggccatggggacatgaccctcatggtgggtgaagtgggatggcctacagatggtgacaagaatgccaatatagctagtgctgttagattctacaacggtcttatgccgaggctcgcggccaatactgggac

SEQ ID NO: 150 - DNA, 356 bp, Eucalyptus grandis
gaacaacaactctccattgctagccaacatctacacctacttcagctacgttggtaacccgaaagacatcagcctgccctacgccctattcacctcgccgtcggtcgtcgtccgagacggagcccatgagtaccggaatctgttcgacgcgatgctggacgccctctactccgcactcgagagggctggcggggctgccctcagggtggtggtctcggagagcggctggccatccgcgggcgcgttcgctgcgacggtcgacaacgcgaggacatacaacgggaatctgatcaagcacgtgaagggcggcacgcgaagaggccgaacggggcgatcgagacctacatattcgcctt

SEQ ID NO: 151 - DNA, 470 bp, Eucalyptus grandis
cttcctcagggagaccggctcgcctttcttggtgaacccgtacccatttttcggcttctccaaggacactctcgattacgcgctgttcaggccgaatgcaggggtgatggatgagaattccaaacttgtttacactaacatgttggacgggcaattggacgctgtctactcggcgatgaaggtgctgggcttcaccgatatcgagatcgtgatagccgaaacaggatggccctcattgtgtgactcgacccaagtcggcgtggatgcaaagacggcggcagaatacaacagtaatctcatccgccatgtatcgtcgggcgccggcacgcccctcatgccaaaacggacatttgagacctacatttttgctctcttcaacgagaatttgaagccgggaccgacgtgcgagaggaacttcggactcttcaggccggacatgacaccggtgtatgatgccgggatcttgaggc

SEQ ID NO: 152 - DNA, 412 bp, Eucalyptus grandis
tgatttattgtgattgccattcctcttctttcctgattctgcatgttacacggtgcagcaactctcttattttaacatcactgggcaggtgtgcccttattccttaatacaaggcagcgtgcacccattagttgaaattaatagggtattttggctgtctattgggcgaaaagaggccccaatgtttctcgtactccgggttcttctggttctcgtcgaacatggcaaatatgtaagtttcgatcggctttccgggcttcttgggagtcccttgcttcacgtgctgaatcaaattcgagttgtaaattctcgcgttttcaatggacgttcccttcccgccagcagatgggccaaccactctccgacacaaccacttctagggaccccccgccggatttctctagtgcagagt

SEQ ID NO: 153 - DNA, 328 bp, Eucalyptus grandis
gaacaacaactctccattgctagccaacatctacacctacttcagctacgttggtaacccgaaagacatcagcctgccctacgccctattcacctcgccgtcggtcgtcgtccgagacggagcccatgagtaccggaatctgttcgacgcgatgctggacgccctctactccgcactcgagagggctggcggggctgccctcagggtggtggtctcggagagcggctggccatccgcgggcgcgttcgctgcgacggtcgacaacgcgaggacatacaacgggaatctgatcaagcacgtgaagggcggcacgccgaagaggccgaac

SEQ ID NO: 154 - DNA, 373 bp, Eucalyptus grandis
gttaacgcctaccccttcttcgcctacgagtccaactccgacgtcatctccctggactacgccctcttccgggagaacccgggcgtcgtcgacgccggcaacgggctccgctacttcaacctcttcgacgcccagatcgacgccgtcttcgccgccatgtcggccctcaagtacgacgacatcaagatggtcgtcaccgagacgggctggccctccaagggcgacgagaacgaggtcggcgccagcaaggacaatgccgccgcctacaacggcaacctcgtccgccggatcctcaccggcggcggcacccctctgaggcggcaggccgacctcaccgtctacctcttcgcgctcttcaacgagaacaagaagc

SEQ ID NO: 155 - DNA, 465 bp, Eucalyptus grandis
cgatcatcagtttcctggtgagcaacaactctccattgctagccaacatctacacctacttcagctacgtcggtaacccgaaagacatcagcctgccctacgccctattcacctcgccatcggtcgtcgtccgagacggggcccatgagtaccggaacctgttcgacgcgatgctggacgccctctactccgcactcgagagggctggcggggctgccctccgggtggtggtctcggagagcggctggccatccgcgggcgcgttcgctgcgacggtcgacaacgcgaggacatacaacgggaatctgatcaagcacgtgaagggcggcacgccgaagaggccgaacggggcgatcgagacctacatattcgccttgttcgacgagaaccagaagcagccggagctggagaagcacttcgggctcttcttccccaacaagcagcccaagtacccgctcagctttg

SEQ ID NO: 156 - DNA, 359 bp, Eucalyptus grandis
ccagatcaaggtctcaacagctgtggacacgcgcatcttaggagaatcgtctcctccatctaagggcacacttaaggccgatcacagacctctcctagatcctataatcacattcctagtcaacaacaagtcccctctgcttgtcaacatctatccgtacttcagctacagcgacaatcccaacgaacgcctcgactatgctctgttcacggcgaactcggttgtggtgtcggatggagcacttgggtaccggaacttgtttgacgcaattctagatgctgtttactctgcactagagaaatccggcggggggtccctagaagtggttgtgtcggagagtggttggccatctgctggcg

SEQ ID NO: 157 - DNA, 325 bp, Eucalyptus grandis
ccagatcaaggtctcaacagctgtggacacgcgcatcttaggagaatcgtctcctccatctaagggcacacttaaggccgatcacagacctctcctagatcctataatcacattcctagtcaacaacaagtcccctctgcttgtcaacatctatccgtacttcagctacagcgacaatcccaacgaacgcctcgactatgctctgttcacggcgaactcggttgtggtgtcggatggagcacttgggtaccggaacttgtttgacgcaattctagatgctgtttactctgcactagagaaatccggcggggggtccctagaagtg

SEQ ID NO: 158 - DNA, 362 bp, Eucalyptus grandis
gtttgctatgggatgctcgggaacaacctgccgtccgcgtcggaagtcgtcgccctctacaagtcccgcggcatcacgcagatgagactctacgaccctagccaaccagctctacaagccctgagaggctcgaacatcgagctcatcctcggcgtccccaactcggagctccaggcccttgcttccaaccccgccaacgcgaactcgtgggtgcagaggaacgtgaagaactactcgcccggcgtcaggttccgctacatcgccgtgggcaacgaggtgagccctgtcaacggaggcactgcacaattcgccaggttcgtcctccccgcgatgaggaacatacaggccgcgctcagatcgtc

SEQ ID NO: 159 - DNA, 432 bp, Eucalyptus grandis
taaatgccgatgtatacgaatcaccagaagacaacccacttccatccgccggaacgttccgaagcgacataagtgatgtcatgacccaaatcgtcaagttcatggctgagaacaatgcacccttcaccgtgaacatttacccgtttctgagtctttacggcaataatgacttccctttcaattatgctttcttcgacggtgcaactccaattgttgacaaggggattgagtacaccaatgtctttgatgccaactttgacactttggtgtcggctcttaaagcagttggacatgggaacatgaccatcatcataggcgaggtgggttggcccacagaaggtgacataaatgcaaacaacggtaacgcgtacaggttttataatgggctctttacaaaacttggagcgaatagagggactccacttcggccag

SEQ ID NO: 160 - DNA, 379 bp, Eucalyptus grandis
caccgtacctgtgaacgcagacgtgtacaactcccccgtcagcaatcccgtaccatccgctgggaggtttaggactgacatcagcgatctcatgacccaaattgtcgagttcctagccaagaacagcgcacctctcaccgtcaacatttatccattcctgagtctctatggtaacgacaacttccccatcgactatgccttcttcgatggggccaccccagtcgtggacaacgggatacaatacacgaacgtgttcgatgccaacttcgacactctagtatcggctcttaaggtggtgggccatggggacatgaccctcatggtgggtgaagtgggatggcctacagatggtgacaagaatgccaatatagctagtgct

SEQ ID NO: 161 - DNA, 361 bp, Eucalyptus grandis
gtttgctatgggatgctcgggaacaacctgccgtccgcgtcggaagtcgtcgccctctacaagtcccgcggcatcacgcagatgagactctacgaccctagccaaccagctctacaagccctgagaggctcgaacatcgagctcatcctcggcgtccccaactcggagctccaggcccttgcttccaaccccgccaacgcgaactcgtgggtgcagaggaacgtgaagaactactcgcccggcgtcaggttccgctacatcgccgtgggcaacgaggtgagccctgtcaacggaggcactgcacaattcgccaggttcgtcctccccgcgatgaggaacatacaggccgcgctcagatcgt

SEQ ID NO: 162 - DNA, 402 bp, Pinus radiata
ggactacgctctcttccggcccagcaatggcgtggtcgattccaagaccaatttgcactacgacaacctgttctacgcccagatcgacgctgcgtactcggcgctcgccgctctgggctacggtaaggtcgaggtcagggtctcggagacagggtggccctccaagggggacgatgatgagctcggtgccacgcccgagaatgcaaagacttacaatgggaaccttttggagaggctccacaagaaggagggtactcccctgaagcccaatgtgagcgtgcaggccttcatttttgcgctctttaatgagaatttgaagtccgggcctacatccgagagaaattatgggctctttaaaccagacggaaccgagacgtatgaccttggcttgaaagggattga

SEQ ID NO: 163 - DNA, 297 bp, Pinus radiata
ccctcgtcgatacccttctttctgccatggaggacttggggtatcgcaacatcccactcatcgttactgaaagcggatggccttctggtggcaatgatgtggccacggttgacaacgctcgcgtttataacaacaatctcatccgccatgtgctctcaaatgtagggactcccaagaggccgggaacgagcattgagacctacatcttcgcacttttcaacgagaacagaaaagctggtgatgagacggagcgtcactttgggcttttctaccctaaccaacaatttgtatactctg

SEQ ID NO: 164 - DNA, 427 bp, Pinus radiata
gcttcccaccgtctaaaggtgtcttcaggaacgaggttaaagatatcatgagttctctacttcaattcctgtcagatcacgggtctcccttcatggctaacatctatccatacttcagctacaatgggaacaggggttccatttctctggactacgctctgtttaggtcaacctctaccgtggtgcaggacgagggtcgcagctacatcaacttattcgatgccctcgtcgatacccttctttctgccatggaggacttggggtatcgcaacatcccactcatcgttactgaaagcggatggccttctggtggcaatgatgtggccacggttgacaacgctcgcgtttataacaacaatctcatccgccatgtgctctcaaatgtagggactcccaagaggccgggaacgagcattgagacctacat

SEQ ID NO: 165 - DNA, 205 bp, Pinus radiata
ggttgacaacgctcgcgtttataacaacaatctcatccgccatgtgctctcaaatgtagggactcccaagaggccgggaacgagcattgagacctacatcttcgcacttttcaacgagaacagaaaagctggtgatgagacggagcgtcactttgggcttttctaccctaaccaacaatctgtatactctctaaactttactccg

SEQ ID NO: 166 - DNA, 393 bp, Pinus radiata
ggactacgctctgtttaggtcaacctctaccgtggtgcaggacgagggtcgcagctacatcaacttattcgatgccctcgtcgatacccttctttctgccatggaggacttggggtatcgcaacatcccactcatcgttactgaaagcggatggccttctggtggcaatgatgtggccacggttgacaacgctcgcgtttataacaacaatctcatccgccatgtgctctcaaatgtagggactcccaagaggccgggaacgagcattgagacctacatcttcgcacttttcaacgagaacagaaaagctggtgatgagacggagcgtcactttgggcttttctaccttaaccaacaatctgtatactctctaaactttactccgtaactgcg

SEQ ID NO: 167 - DNA, 394 bp, Pinus radiata
ggactacgctctgtttaggtcaacctctaccgtggtgcaggacgagggtcgcagctacatcaacttattcgatgccctcgtcgatacccttctttctgccatggaggacttggggtatcgcaacatcccactcatcgttactgaaagcggatggccttctggtggcaatgatgtggccacggttgacaacgctcgcgtttataacaacaatctcatccgccatgtgctctcaaatgtagggactcccaagaggccgggaacgagcattgagacctacatcttcgcacttttcaacgagaacagaaaagctggtgatgagacggagcgtcactttgggcttttctaccttaaccaacaatctgtatactctctaaactttactccgtaactgcgt

SEQ ID NO: 168 - DNA, 498 bp, Pinus radiata
  misc_feature (1)...(498): n = A,T,C or G
ggnnacgctctgtttaggtcaacctctaccgnggtgcaggacgagggtcgcagctacatcaacttattcgatgccctcgtcgatacccttctttctgccatggaggacttggggtatcgcaacatcccactcatcgttactgaaagcggatggccttctggtggcaatgatgtggccacggttgacaacgctcgcgtttataacaacaatctcatccgccatgtgctctcaaatgtagggactcccaagaggccgggaacgagcattgagacctacatcttcgcacttttcaacgagaacagaaaagctggtgatgagacggagcgtcactttgggcttttctaccttaaccaacaatctgtatactctctaaactttactccgtaactgcgtcgcagtccgacgaacgaatagagccaatatgaatatgtcctctatatgtcaactgcctcgatagatatattatgtaacatgctcgatgcagctcatatgcttcta

SEQ ID NO: 169 - DNA, 278 bp, Pinus radiata
ggactacgctctgtttaggtcaacctctaccgggtgcaggacgagggtcgcagctacatcaacttattcgatgccctcgtcgatacccttctttctgccatggaggacttggggtatcgcaacatcccactcatcgttactgaaagcggatggccttctggtggcaatgatgtggccacggttgacaacgctcgcgtttataacaacaatctcatccgccatgtgctctcaaatgtagggactcccaagaggccgggaacgagcattgagacctcatc

SEQ ID NO: 170 - DNA, 419 bp, Pinus radiata
ggactacgctctgtttaggtcaacctctaccgaggtgcaggacgagggtcgcagctacatcaacttattcgatgccctcgtcgatacccttctttctgccatggaggacttggggtatcgcaacatcccactcatcgttactgaaagcggatggccttctggtggcaatgatgtggccacggttgacaacgctcgcgtttataacaacaatctcatccgccatgtgctctcaaatgtagggactcccaagaggccgggaacgagcattgagacctacatcttcgcacttttcaacgagaacagaaaagctggtgatgagacggagcgtcactttgggcttttctaccttaaccaacaatctgtatactctctaaactttactccgtaactgcgtcgcagtccgacgaacgaatagagcc

SEQ ID NO: 171 - DNA, 437 bp, Pinus radiata
gacgtacggatcgtatcttgttcccgccatgaggaacattcaaacagcgattgaaaacgtcaatctgcagaataacatcaaggtctcaaccactcactcctcgggcgttactaatggcttcccaccgtctaaaggtgtcttcaggaacgaggttaaagatatcatgagttctctacttcaattcctgtcagatcacgggtctcccttcatggctaacatctatccatacttcagctacaatgggaacaggggttccatttctctggactacgctctgtttaggtcaacctctaccgtggtgcaggacgagggtcgcagctacatcaacttattcgatgccctcgtcgatacccttctttctgccatggaggacttggggtatcgcaacatcccactcatcgttactgaaagcggatggccttctggtggcaatgatg

SEQ ID NO: 172 - DNA, 343 bp, Pinus radiata
  misc_feature (1)...(343): n = A,T,C or G
gacgtacggatcgtatcttgttcccgccatgaggaacattcaaacagcgattgaaaacgtcaatctgcagaataacatcaaggtctcaaccactcactcctcgggcgttactaatggcttcccaccgtctaaaggtgtcttcaggaacnaggttaaagatatcatgagttctctacttcaattcctgtcagatcacgggtctcccttcatggctaacatctatccatacttcagctacaatgggaacaggggttccatttctctggactacgctctgttaggtcaacctctaccgtggtgcaggacgagggtcgcagctacatcaacttattcgatgccctcg

SEQ ID NO: 173 - DNA, 563 bp, Pinus radiata
ctggattatgctctgtttaagtctacgtctacggtggtgcaagacggtgatcacagctacaccaacctgttcgatgccatggttgacactcttttgtcggccatggaagcctcggggtatcccaacatcccgatcgtcattgccgaaagtggatggccttctgctggcgcggatctggccaccattgagaatgctcagagctataacaataatcttattaaacatgtattatcgaatgcaggaacaccaaagaggccaggaatgagcatcgacacatatgttttcgcgcttttcaacgaggatttgaaaggcaacgagacagagaaacactttggactattcgaccctactactaaacagcctgtatactctgtcaacttctcaccatgagttgtgttggaatccacatcacatgtgacccgagtcgatgcagacaagcccttatcttcatgcactgctatatgtaatctgcaagtgtatggttatttctaaaataaataaaatgtcaaagaaagttgagtttatttctaaaataaataaaatgcaggcagagttccctgagt

SEQ ID NO: 174 - DNA, 639 bp, Pinus radiata
caacgaattgcagctcatctcctccagccaggacgccgcgaatggttgggtcaatgacaacattcgccccttctatcccgccaccaatatcaagtatattgcagtaggcaacgaggttttgataaaaacgacgtacggatcgtatcttgttcctgccatgaggaatattcaaaccgcgctgcagaacgccaatctgcagaataacatcaaggtctcgaccactcactcctccgatgttagcgagggctacccgccgtctaacggtgtgttcaaagacgaggtcaaggacaccatgaagtctgtgcttcaattcctgttagatcacgggtctcccttcatgggcaacatctatccatacttcagctacatcaacaacagggctcagataactctggactacgctctgttcaaatccacgtctacagtggtgcaagacaaaggtcggagttcaaatacttgttcgatgccttggtcgatactcttgtttcggccatggaagccttgggatatcccaacatcccactgatcgttaccgaaagcggatggccttctgctgaggcggatgtggccacagttgacaatgctcgtacttataacaacaatctcatccgccatgtcttatcgaatgaagggacacca

SEQ ID NO: 175 - DNA, 534 bp, Pinus radiata
aaatggttgggttaatgacaatattgtcccctatctatcaccagtatcaaatatattgcggtgggcaacgaggttttgcctagcacgcagtacgtatcgtatcttgttcctgccatgaacaacattcaaaccgcgatccagaacgccaatctgcagaacatcaaggtctctaccccccatgccttcaatgttataggcaacagttacccgccttcacagggagcattcagtgacgatgtgaaggataccatgagctctatactcaaatttctgtcagataacggggctccgttcatggccaatgtgtatccatatttcagctacgtcggcgacagcagcaacattcatctggactacgctctctttcagcccacggctacggcggtgacagacggagatcacagctacagcaatttgtttgatgccatggtggattctattttctccgcaatggaagccttgggatattccaacatcccacttattgttactgaaagcggatggccatctgctggcgcggatgcggccacaact

SEQ ID NO: 176 - DNA, 345 bp, Pinus radiata
ggttaacgagcacattgtgcccttctatcccgccaccaatgtcaaatacattgctgtgggaaacgaggttttgataggcgatgccaacaacgtaccctatcttgttccggccatgaacaacattcaaactgcgatccagaacgctaaactgcaggatagcatcaaggtctctaccacccacaggccggatgttagcagcggctacccgccgtctaaaggagtcttcgtagatgctgtgaaggacacgatgggccaaatactcaaatttctgtcacagaacggcggtcccttcatggcggatgtctatccatacttcagctacatcggcaacccaagcaacattca

SEQ ID NO: 177 - DNA, 339 bp, Pinus radiata
cccgatcgtcattaccgaaagtggatggccttctgctggcgcggaagtggccaccattgagaatgctcagacctataacaataatcttattaaacatgtattatcgaatgcaggaacaccaaagaggccaggaatgagcatcgacacatatgttttcgcgcttttcaacgaggatttgaagcaaggcgacgagacatagaaacactttggactattcgaccctaatactaaacagcctgtatactctgtcaacttctcaccatgagttgtgttggaatccacatcacatgtgacccgagtcgatgcagacaagcccttatcttcatgcactgctatatg

SEQ ID NO: 178 - DNA, 313 bp, Pinus radiata
gtcataactgagagcgggtggccttccgcgggcaatgaggcggctactgttgagaatgcgcagacttacaacaacaatctgatcaaacatgtgctttcaaatgcaggaacgccaaagaggcctggacagcacattgatacatacattttcgctcttttcaacgagaatttgaaaggcggggacgagccagaacgacattttggacttttctatcctgatcaaaaccttgtttaccctgttaacttctccccttaaattcatctgatctgtgttttgcattagaatttccagtattacccattttctcacaata

SEQ ID NO: 179 - DNA, 460 bp, Pinus radiata
cgacaacattcgccaattctatccggccaccaacatcaaatacatcgctgttggcaacgaagttttttcaagtgaaaatcggcagcatcttccatatctcgttcctgccatgagaaacattcaaaccgcagtccagaacgccaatctgcagagctccataaaggtctccactacccacgccacgtctgttctgggaaactcgtatcccccttctcagggagaattcgctgatgaattgaagagtagcatgagcgatgtacttaactttctggcagagaatgggtctcctttcatggctaacgtgtatccctacttcagttacatttacaaccaggcccaaatctcgttagactatgctttgtttaaatccgcggatcccgtggtgagtgatgaaggtcgtctctataaaagcttgttcgatgcgctggtggattctctgatttccgctatggagaaatcg

SEQ ID NO: 180 - DNA, 296 bp, Pinus radiata
ttatggcggcgtctatccatacttcagctacatcggcaacacaaaagacatttctctggattatgctctgtttaagtctacgtctacggtggtgcaagacggtgatcacagctacaccaacctgttcgatgccatggttgatactcttttgtcggccatggaagcctctgggtatcccaacatcccgatcgtcattaccgaaagtggatggccttctgctggcgcggaagtggccaccattgagaatgctcagacctataacaataatcttattaaacatgtattatcgaatgcag

SEQ ID NO: 181 - DNA, 351 bp, Pinus radiata
tacgtaccctatcttgttccggccatgaagaacattcaaactgcgatccagaacgctaaactgcaggatagcatcaaggtctctaccacccacaggccggatgttagcagcggctacccgccgtctaaaggagtcttcgtagatgctgtgaaagacacgatgagccaaatactcaattttctgtcacagaacggtggtcccttcatggcggacgtctatccatacttcagctacatcggcaacacaaaagacatttctctggattatgctctgtttaagtctacgtctacggtggtgcaagacggtgatcacagctacaccaacctgttcgatgccatgggtgatactctt

SEQ ID NO: 182 - DNA, 457 bp, Pinus radiata
caatcttccatctccagacgaggtggtaactttgatgaagtccaacaacattgggaaaacgagaatttaccaggaaaacgatgttgtactgcaagctttcgcgaattctggtatcgatgtaatagtgggtgtcgctaacgaagaactgaagaacatatcttccagccaagactcggcaaaccgttgggttaacgagcacattgtgcccttctatcccgccaccaatgtcaaatacattgcagtgggaaacgaggttttgaaaagcttggacaacgttcagtacataccctatcttgttccggccatgaacaacattcaaactgcgatccagaacgctaaactgcagaatagcatcaaggtctctaccacccacaggccggatgttagcagcggcaacctgccgtctgaaggagtcttcatagatgctgtaaaggacacgatgagccaaatactcaat

SEQ ID NO: 183 - DNA, 358 bp, Pinus radiata
ctttgatgaagtccaacaacattgggaaaacgagaatttaccaggaaaacaaagttgtactgcaagctttggcgaattctggtatcgatgtaatagtgggtgtcgctaacagcgaactggaggacatatcttccagccaagactcggcaaaccgttgggttaacgagaacattgtgcccttctatcccgccaccaatgtcaaatacattgcagtgggaaacgaagttttgataggcaacgttcagtacgtaccctatcttgttccggccatgaagaacattcaaactgcgatccagaacgctaaactgcaggatagcatcaaggtctctaccacccacaggccggatgttagcagcgg

SEQ ID NO: 184 - DNA, 348 bp, Pinus radiata
cgtaccctatcttgttccggccatgaagaacattcaaactgcgatccagaacgctaaactccaggatagcatcaaggtctctaccacccacaggccggatgttagcagcggctacccgccgtctaaaggagtcttcgtagatgctgcgaaggacacgatgagccaaatactcaattttttgtcacagaacggtggtcccttcatggcggacgtctatccatacttcagctacatcggcaacacaaaagacatttctctggattatgctctgtttaagtctacgtctacggtggtgcaagacggtgatcacagctacaccaacctgttcgatgccatggttgatactct

SEQ ID NO: 185 - DNA, 594 bp, Pinus radiata
aactttgatgaagtccaacagcattgggaaaacgagaatttaccaggaaaacaaagttggactgcaagctttggcgaattctggtatcgatgtaatagtgggtgtgctaacagcgaactggaggacatatcttccagccaagactcggcaaaccgttgggttaacgagaacattgtgcccttctatcccgccaccaatgtcaaatacattgcagtgggaaacgaagttttgataggcaacgttcagtacgtaccctatcttgttccggccatgaagaacattcaaactgcgatccagaacgctaaactgcaggatagcatcaaggtctctaccacccacaggccggatgttagcagcggctacccgccgtctaaaggagtcttcgtagatgctgtgaaagacacgatgagccaaatactcaattttctgtcacagaacggtggtcccttcatggcggacgtctatccatacttcagctacatcggcaacacaaaagacatttctctggattatgctctgtttaagtctacgtctacggggtgcaagacggtgatcacagctacaccaacctgttcgatgccatggttgatactc

SEQ ID NO: 186 - DNA, 360 bp, Eucalyptus grandis; identical to SEQ ID NO: 120

SEQ ID NO: 187 - DNA, 397 bp, Eucalyptus grandis
atccaccctagcgagcaggatgaggtctctcaaatactacttgaaacttttagatgtgtcccgacttttttgccctctgatttgtttactagatactatcatgggttctgcaagcaacagctttggccattgttccattacatgttgcctttgtcgcctgacctcggtggtcggttcaaccggtccttgtggcaggcttatgtctccgtcaataagattttcgcagataggatcatggaagtgattaatccagaggatgatttcgtttgggtacacgattaccatttgatggtgttgccgactttcttgaggaaaaggttcaatagagtgaagcttggcttcttccttcacagcccattcccctcttcagagatttacaagactctgccgatcaggg

SEQ ID NO: 188 - DNA, 531 bp, Eucalyptus grandis
ggaagacaaagagaagagctatatttctggattatgacggcactgttgttcctgaaacttctatcagtaaaatgccagggcctgaagtcctttctgttttgaacgctctctgtaatgatccaatgaacactgtatttattatcagtgggcgggggagaaaatcattaagtgagtggctttcttcttgcaagaagcttggaatagccgctgagcatgggtattttataaggtggaacagtgcagccgagtgggaaaccagttcattgtctgctgatcttgattggaagaataccgtggaacctataatgaattcatacacagaggcaactgatggctcaagcatagagtacaaggagagcgctttggtgtggcaccatcaggatgcagaccctgattttggatcatgccaagccaaggaattgttggctcatctagagagtgtgctcgcaaatgaacctgcagttgttaagaggggacagcaaattgtggaggtcaaacctcagggagtaagcaaaggattggttgcagaga

SEQ ID NO: 189 - DNA, 329 bp, Eucalyptus grandis
atcctccagaaatcagcttttgttgtcttactcctcaaaaagtgaggcacttgccagttccttgagaaacgagactacgtcgtcagaggatgtaagcatgtagcgagcatttgtacgggtccgcccaacagcgcatgagaaatagttttcccccttgagatcgagcacattccaagatattttatccggagatgacctcctcccactaccactggcatggttgttagttcttttctcagggtttggtaaaggtcgttgtgtcttcaccgcagacgcttttgacccgcttttactagcttgaagcttcaatgaagatcgtttctcccctg

SEQ ID NO: 190 - DNA, 503 bp, Eucalyptus grandis
accaaaagccgagcgattcttttggattatgatggagctatggggtcaacaggatccaattccatcagtgtgatacctactgctgagacagttggactcattaacagtttgtgccgagatcccaagaatgttgtcttccttgtcagtggaaaggagcgagttatcctaagtaaatggttctcatcgtgtgatagacttgggttagcagcagagcatggctattttcttaggccaaaccaagaaggagattgggaaacttgtgtttcggtgacagattttgactggaaacagacagctgagccggttatgagattatacatggaaacaactgatggctctactatagaaatcaaagagagttcaattgtgtggaactaccagtgcgcagatccagattttggtttttgccaggcaaaggaacttttagatcacctggaaagtgttcttgcaaatgaacctgtttctgtcaagagtggccaacacattgtggaagttaaacctca

SEQ ID NO: 191 - DNA, 398 bp, Eucalyptus grandis
  misc_feature (1)...(398): n = A,T,C or G
acgacactagaggatccaaagtctcgcaaaaagggattgaggtcataaatccagaggatgactatgtctggatacatgattatcattggagggggttgcctactttcttaagaaggaagttcatcaagctgaggatggggttctttctccatagcccttttccatcatcagagatatataggactcttccagnnagggaggagatactcaaagcgcttcttaatgctgacctgattggtttccacacgttcgattatgctcggcattttctatcctgttgcagtagaatctggggngtggagtaccagtcgaaaaggggttatatcggnttggaatattatggaagaacaattggggtaaagatcatgcctgttgggatccacatgggccagattcag

SEQ ID NO: 192 - DNA, 457 bp, Eucalyptus grandis
  misc_feature (1)...(457): n = A,T,C or G
ggcaggcttatgtctccgtcaataagattttcgcagataggatcatggaagtgattaatccagaggatgatttcgtttgggtacacgattaccatttgatggtgttgccgactttcttgaggaaaaggttcaatagagtgaagcttggcttcttccttcacagcccattcccctcttcagagatttacaagactctgccgatcanggaggagcttctganggctttcctgaattctgatttgatagggttccacactttcgactatgcacgccatttcctgtcttgttgtagtcggatgcttggtcttacctatgaatcgaagaggggttatataggcctggactattatggtcggactgttagtatcaaaattcttccagttgggatacacatgggacaattgcagtccgttttaagccttcccgagactgaagccaaggtggccgaactaattaa

SEQ ID NO: 193 - DNA, 359 bp, Eucalyptus grandis
gcctgacctcggtggtcggttcaaccggtccttgtggcaggcttatgtctccgtcaataagattttcgcagataggatcatggaagtgattaatccagaggatgatttcgtttgggtacacgattaccatttgatggtgttgccgactttcttgaggaaaaggttcaatagagtgaagcttggcttcttccttcacagcccattcccctcttcagagatttacaagactctgccgatcagggaggagcttctgagggctttcctgaattctgatttgatagggttccacactttcgactatgcacgccatttcctgtcttgttgtagtcggatgcttggtcttacctatgaatcgaaga

SEQ ID NO: 194 - DNA, 401 bp, Eucalyptus grandis
ttggcttcttccttcacagcccattcccctcttcagagatttacaagactctgccgatcagggaggagcttctgagggctttcctgaattctgatttgatagggttccacactttcgactatgcacgccatttcctgtcttgttgtagtcggatgcttggtcttacctatgaatcgaagaggggttatataggcctggactattatggtcggactgttagtatcaaaattcttccagttgggatacacatgggacaattgcagtccgttttaagccttcccgagactgaagccaaggtggccgaactaattaagcagtttggtggtcggggtaggacaatgttgctcggtgtagatgacatggatatttttaaaggaattagcttgaaactgttggccatg

SEQ ID NO: 195 - DNA, 364 bp, Eucalyptus grandis
ccgactttcttgaggaaaaggttcaatagagtgaagcttggcttcttccttcacagcccattcccctcttcagagatttacaagactctgccgatcagggaggagcttctgagggctttcctgaattctgatttgatagggttccacactttcgactatgcacgccatttcctgtcttgttgtagtcggatgcttggtcttacctatgaatcgaagaggggttatataggcctggactattatggtcggactgttagtatcaaaattcttccagttgggatacacatgggacaattgcagtccgttttaagccttcccgagactgaagccaaggtggccgaactaattaagcagtttggtggtc

SEQ ID NO: 196 - DNA, 400 bp, Pinus radiata
  misc_feature (1)...(400): n = A,T,C or G
gttttaatgcaacaatgactgcacaagttgatacacctggtagaagaggtcatgatcaaatcaaagagatgaagctccttttgcatcctgatctgggtgaaaccctttcagttttatgtaaggatccaaaaactactatagttgtgcttagcggaagtgaaagaaatgtcttagatgagaattttggcgaactcgacatgtggttagcagcagaaaatggtatgtttctgcgccatacgaaaggagaatggatgatcacaatgccagaatatcttaatatggactggatggagagtgtaaagcttgtttttgattatttcaaagaaaggcacctcgatcgtatgtngaggttcgagaaacctctttagtttggacctataagtatgcagatgttgaattt

SEQ ID NO: 197 - DNA, 298 bp, Eucalyptus grandis
  misc_feature (1)...(298): n = A,T,C or G
taaaaccgntagcagcaagtgctgtccattacaatggtgtattggagtatgatgctcacagtttgtatggtttctcgcaatcaattgctactcacaaagcactccaagggctccagggaaagagacccttcatattgtcgcgctcgacgtacgtgggctccgggaagtatgtngctcactggaccggagataaccaaggnaattgggaaaatctgaagtattccatctccactatgctgaatttcggcatattcggagtgccgatggtcggtgcagacatatgcgggttctaccccaa

SEQ ID NO: 198 - DNA, 402 bp, Eucalyptus grandis
  misc_feature (1)...(402): n = A,T,C or G
ctggaccggagataaccaaggcaattgggaaaatttgaagtattccatctccactatgctgaattttggcatattcggagtgccgatggtcggtgcagacatatgcggcttctacccggccccgactgaggagctttgcaaccgctggattgaaagtcggtgccttntacccnttntttttnggggggnnttncccnntttttttttncccnaaaaggggtttttaatgggactcagtagccgaatctgctaggaatgctcttggcatgagatataggctcctaccttacttgtacactctcaattaccaagctcatacgacgggagccccgattgcacggcctcttttcttttcattccccgattacgtggagagttacggattgagcacccagtttttgc

SEQ ID NO: 199 - DNA, 441 bp, Pinus radiata
atcgacccagggattggcgttaacacgagctacgggacgttccagcgaggaatggcggacgacgttttcataaagcacgacgggagtccgttcttgggtcaggtgtggcccggcgccgtgtactttccggacttcctgaacccaaagacggtggatttctgggccgacgagatctcccgcttccaccaaatggtccccgtggacggtctctggatcgacatgaacgaggtctccaatttctgcagtggcaagtgctccatccccacaaaccggagctgcccgggcacgggtttcccatgggactgctgcctcgactgcacaaacatcaccgccacccgatgggacgtgccaccctaccagatcaacgcctccggtacccaggtcccgctggggttcaagaccatcgccaccagctccgtccactacaacggcgtcctcgag

SEQ ID NO: 200 - DNA, 481 bp, Pinus radiata
ctataacaaatctcagatagctctggatgttatatggaacgatgatgaccacatggatggagccaaagacttcacccttgaccctatcaactatcctgaatataagctgcgtcccttccttgaccgaattcatgccaatggaatgagatatgtcgtccttatcgacccagggattggcgttaacacgagctacgggacgttccagcgaggaatggcggacgacgttttcataaagcacgacgggagtccgttcttgggtcaggtgtggcccggcgccgtgtactttccggacttcctgaacccaaagacggtggatttctgggccgacgagatctcccgcttccaccaaatggtccccgtggacggtctctggatcgacatgaacgaggtctccaatttctgcagtggcaagtgctccatccccacaaaccggagctgcccgggcacggtttcccatgggactgctgcctcgactgcacaa

SEQ ID NO: 201 - DNA, 484 bp, Pinus radiata
ggtggtgcggtgttcaaagtagactggatgagctccgtacaagttggtaccaggagcaacaccataagcatcacggttccaaatagtcctagtagtgttggaaggatcgaggcggaaagtgttggtatgttcgccgagaccatagatgttcgcgttattagggacgacggtcttaagtcggagatattgctcctcaaacacaagcgtgctacccttggtgtcgaacaacacctcgccagactttttacggacaacgctgaacgagaacgggctcggaacatatttgaagacgatatctgccgaggacgccgtgaccttggatgttggacgggggaaaacctcctcggggacttcatatcgcttgcccgccgaatcaccaatcttgacatgaactcgagactcgtcttcgtacgtaacctgcaacttgagctgctgaacgtcactgccgtagatcccacaggtagcggcgagagtcaggtcagcg

SEQ ID NO: 202 - DNA, 418 bp, Pinus radiata
caatgcaggtggggatacaagaacgtatcagacataacgaatgtggtggaaaactataacaaatctcagatacctctggatgttatatggaacgatgatgaccacatggatggagccaaagacttcacccttgaccctatcaactatcctgaatataagctgcgtcccttccttgaccgaattcatgccaatggaatgagatatgtcgtccttatcgacccagggattggcgttaacacgagctacgggacgttccagcgaggaatggcggacgacgttttcataaagcacgacgggagtccgttcttgggtcaggtgtggcccggcgccgtgtactttccggacttcctgaacccaaagacggtggatttctgggccgacgagatctcccgcttccaccaaatggtccccgtggacg

SEQ ID NO: 203 - DNA, 395 bp, Pinus radiata
  misc_feature (1)...(395): n = A,T,C or G
caatgcaggtggggatacaagaacgtatcanacataacgaatgtggtggaaaactataacaaatctcagatacctctggatgttatatggaacgatgatgaccacatggatggagccaaagacttcacccttgaccctatcaactatcctgaatataagctgcgtcccttccttgaccgaattcatgccaatggaatgagatatgtcgtccttatcgacccagggattggcgttaacacgagctacgggacgttccagcgaggaatggcggacgacgttttcataaagcacgacgggagtccgttcttgggtcaggtgtggcccggcgccgtgtactttccggacttcctgaacccaaagacggtggatttctgggccgacgagatctcccgctt

SEQ ID NO: 204 - DNA, 390 bp, Pinus radiata
cgtccttatcgacccagggattggcgttaacacgagctacggcacgttccagcgaggaatggcggacgacgttttcataaagcacgacgggagtccgttcttgggtcaggtgtggcccggcgccgtgtactttccggacttcctgaacccaaagacggtggatttctgggccgacgagatctcccgcttccaccaaatggtccccgtggacggtctctggatcgacatgaacgaggtctccaatttctgcagtggcaagtgctccatccccacaaaccggagctgcccgggcacgggtttcccatgggactgctgcctcgactgcacaaacatcaccgccacccgatgggacgtgccaccctaccagatcaacgcctcggtacccaagtc

SEQ ID NO: 205 - DNA, 245 bp, Eucalyptus grandis
  misc_feature (1)...(245): n = A,T,C or G
ccaccgcagaatccccccggcagtccctggaatcatgttcttgtctggtggacaatctgaagttgaagccaccctgaacttgaatgccatgaaccaatcgncaaacccgtggcacgnatctttctcatatgcccgagccctccagaacacctgcttgaagacatggggaggaagacccgagaacgtgaagccagcccaggaaaccttgcttgtccgcgccaagggcaaatctcttgctcaaactt

SEQ ID NO: 206 - DNA, 510 bp, Eucalyptus grandis
tgagaagcgagagaagcaaagcaagaagcaatggcctctgcttctgcaacgctgctcaagtcatccccagtccttgacaagtccgagtgggtgaagggtcagtctatccgccacgcctcggccaccaccgtgcgctgccatcctgccaccgcctctgtcctcactgtcaaagccagtaatgccgatgaactcgtcaagaccgcgaaaaccatcgcatcgccaggacgtggaattttggccatggacgaatcaaatgccacttgcgggaagcgtcttgcctcgattggactagagaacaccgaagccaaccgccaagcctacagaactctgctggtgacagttccagggctcggcgagtacatctccggtgccatcctcttcgaggagactctctaccagtccacagtcgatggacgcaagatggttgatgtacttgttgagcagaacatcgtccccggtatcaaagtcgacaagggttggtgctttggcggtttaacaatgagtctggtg

SEQ ID NO: 207 - DNA, 413 bp, Eucalyptus grandis
tggtgcctttggctgggtccaacgacgagtcctggtgccaagggctcgatggattagcatcccgcacggctgcttactaccagcagggtgcacgctttgctaaatggagaactgtggtgagcatccccaatggcccatctgccctggccgtgaaggaagccgcctggggtcttgcccgctacgctgccatttgccaagacaatggattgaccccaatagtggagccggagatcttgctggatggagagcacgggatcgagaggacattcgaggtggccctgaaggtgtgggcggaggtgttctactacatggctgagaacaatgtactgttcgagggcatcctcttgaagcccagcatggtcactcccggcgctgagtgcaaagagagggccactccccagcaagtggccgag

SEQ ID NO: 208 - DNA, 434 bp, Eucalyptus grandis
  misc_feature (1)...(434): n = A,T,C or G
gctgtccctgccgttgtgtttttgtctggtgggcagagtgaggaggaggcaaccctcaacctcaatgccatgaacaagctcaagggcaagaaaccatggtctctttccttctcctttggacgggctcttcagcagagcactttgaagtcttgggntggaaaggaggagaacgtgcccaaggcacaggctgcattatttactaggtgcaaggcaaactcagaggcaactcttggtacttacaagggtgacgcaaagcttggcgagggagctgctgaaagtctccatgttaaggattacaagtactaaggtgcttttgctggcggtattttctgcttttcatttgagaaaaataggtgtctggagatatcctatttttgtactaggataataagcatgactgtactgtactggtaatgcattttcattgatgttgt

SEQ ID NO: 209 - DNA, 350 bp, Eucalyptus grandis
acttgtagtccttaacatggagagactcggaagcaccctcgccaagttgagcatcacccttgtatgttccaagagttgcgtccgagttggccttgcatcttctgagaagtgcagcctgtgccttgggaatgttctcttcctttccagcccacgccttcaaggtgctctgctgtagggcccgaccaaaagagaaggagaggctccatggcttcttgcccttgagcttgttcatggcattgaggttcaaagtggcctcctcctcactctgcccaccggacaagaagacaatggccggaacagcaggaggcactgttcgctgcagggcacgaacggtgtactcagcaatgacc

SEQ ID NO: 210 - DNA, 455 bp, Eucalyptus grandis
gcgaaaaacaatggcctcggcttctctcctcaagtcatctcccgtgctcgacaagtcggagtttgtgaagggcacgcagactctccgcaccccatctctcgccgccgtccgctaccaccccaccaccgccccctccgctctcgtcgtcaaagccagtgcctatgctgatgagctcgtcaagactgcgaaaacagttgcatcacccgggagaggaatcctggccatggacgagtcaaacgcaacctgcgggaagcgtttggcgtcgatcgggctagagaacaccgaggccaaccgccaggcctacaggacactcctggtcagtgctccggggcttggccagtacatctctggtgctatcctcttcgaggagactctctaccaatccaccaccgacggccgcaagatggtcgacgtcctcgttgagcagaacattgtccctggtattaaagtcgaca

SEQ ID NO: 211 - DNA, 509 bp, Eucalyptus grandis
ggagggagaagctttgagaagagataaggtaacacagtttttgcttgccgggctgtgctcgagtttggcctttgcaagcgaaaaacaatggcctcggcttctctcctcaagtcatctcccgtgctcgacaagtcggagtttgtgaagggcacgcagactctccgcaccccatctctcgccgccgtccgctaccaccccaccaccgccccctccgctctcgtcgtcaaagccagtgcctatgctgatgagctcgtcaagactgcgaaaacagttgcatcacccgggagaggaatcctggccatggacgagtcaaacgcaacctgcgggaagcgtttggcgtcgatcgggctagagaacaccgaggccaaccgccaggcctacaggacactcctggtcagtgctccggggcttggccagtacatctctggtgctatcctcttcgaggagactctctaccaatccaccaccgacggccgcaagatggtcgacgtcctcgttgagcagaacat

SEQ ID NO: 212 - DNA, 364 bp, Eucalyptus grandis
atttgaagttgctcagaaggtttgggctgaggttttctactacctggctgagaacaatgtcatgtttgagggtatcctccttaagcccagcatggtcactcctggtgccgagtgcaaggacaaggccactcctcaacaagtcgctgaatacaccctcaagcttctccaccgcagaatccccccggcagtccctggaatcatgttcttgtctggtggacaatctgaagttgaagccaccctgaacttgaatgccatgaaccaatcgccaaacccgtggcacgtatctttctcatacgcccgagccctccagaacacctgcttgaagacatggggaggaagacccgagaacgtgaagccagcccag

SEQ ID NO: 213 - DNA, 372 bp, Eucalyptus grandis
ctgaagttgaagccaccctgaacttgaatgccatgaaccaatcgccaaacccgtggcacgtatctttctcatacgcccgagccctccagaacacctgcttgaagacatggggaggaagacccgagaacgtgaagccagcccaggaaaccttgcttgtccgcgccaaggccaactctcttgctcagcttggcaagtacacaggtgagggcgagtccgaggaggccaagaaaggaatgttcgtcaagggctacgtgtattaagctgttcactgtaggtggaagtggatgatcaaagttgggagacttaagaattgatccctctcagcgtgttatgattatagccacggagactatttttgcacatcgaatgtac

SEQ ID NO: 214 - DNA, 471 bp, Eucalyptus grandis
atattaacctcctcatataaaaatataaaacttcataaagaagtcgcaaacattcaaccatcacaacatcaatgaaaatgcattaccagtacagtcatgcttattatcctagtacaaaaataggatatctccagacacctatttttcttaaaaggaaaagcagaaaataccgccagcaaaaaagcaccttagtacttgtaatccttaacatggagactttcagcagctccctcgccaagctttgcgtcacccttgtaagtaccaagagttgcctctgagtttgccttgcacctagtaaataatgcagcctgtgccttgggcacgttctcctcctttccagcccaagacttcaaagtgctctgctgaagagcccgtccaaaggagaaggaaagagaccatggtttcttgcccttgagcttgttcatggcattgaggttgagggttgcctcctcctcactctgcccaccagac

SEQ ID NO: 215 - DNA, 465 bp, Eucalyptus grandis
acggtcagtaatccacgaaacaaacgaagcacaagtaatagtatcgcagcaaagcctagatccgcccctcagtacttgtagtccttaacatggagagactcggaagcaccctcgccaagttgagcatcacccttgtatgttccaagagttgcgtccgagttggccttgcatcttctgagaagtgcagcctgtgccttgggaatgttctcttcctttccagcccacgccttcaaggtgctctgctgtagggcccgaccaaaagagaaggagaggctccatggcttcttgcccttgagcttgttcatggcattgaggttcaaagtggcctcctcctcactctgcccaccggacaagaagacaatggccggaacagcaggaggcactgttcgctgcagggcacgaacggtgtactcagcaatgacctccggagcaaccttgggggcatctgatccgggggtgaccatg

SEQ ID NO: 216 - DNA, 484 bp, Eucalyptus grandis
ctcatataaaaatataaaacttcataaagaagtcgcaaacattcaaccatcacaacatcaatgaaaatgcattaccagtacagtcatgcttattatcctagtacaaaaataggatatctccagacacctatttttctcaaatgaaaagcagaaaataccgccagcaaaaaagcaccttagtacttgtaatccttaacatggagactttcagcagctccctcgccaagctttgcgtcacccttgtaagtaccaagagttgcctctgagtttgccttgcacctagtaaataatgcagcctgtgccttgggcacgttctcctcctttccagcccaagacttcaaagtgctctgctgaagagcccgtccaaaggagaaggaaagagaccatggtttcttgcccttgagcttgttcatggcattgaggttgagggttgcctcctcctcactctgcccaccagacaaaaacacaacggcagggacagccg

SEQ ID NO: 217 - DNA, 362 bp, Eucalyptus grandis
cgtccctcagtacttgtagtccttaacatggagagactcggaagcaccctcgccaagttgagcatcacccttgtatgttccaagagttgcgtccgagttggccttgcatcttctgagaagtgcagcctgtgccttgggaatgttctcttcctttccagcccacgccttcaaggtgctctgctgtagggcccgaccaaaagagaaggagaggctccatggcttcttgcccttgagcttgttcatggcattgaggttcaaagtggcctcctcctcactctgcccaccggacaagaagacaatggccggaacagcaggaggcactgttcgctgcagggcacgaacggtgtactcagcaatgacct

SEQ ID NO: 218 - DNA, 395 bp, Eucalyptus grandis
ccttaacatggagagactcggaagcaccctcgccaagttgagcatcacccttgtatgttccaagagttgcgtccgagttggccttgcatcttctgagaagtgcagcctgtgccttgggaatgttctcttcctttccagcccacgccttcaaggtgctctgctgtagggcccgaccaaaagagaaggagaggctccatggcttcttgcccttgagcttgttcatggcattgaggttcaaagtggcctcctcctcactctgcccaccggacaagaagacaatggccggaacagcaggaggcactgttcgctgcagggcacgaacggtgtactcagcaatgacctccggagcaaccttgggggcattgatccgggggtgaccatgttgggcttcaaca

SEQ ID NO: 219 - DNA, 416 bp, Eucalyptus grandis
cgtccctcagtacttgtagtccttaacatggagagactcggaagcaccctcgccaagttgagcatcacccttgtatgttccaagagttgcgtccgagttggccttgcatcttctgagaagtgcagcctgtgccttgggaatgttctcttcctttccagcccacgccttcaaggtgctctgctgtagggcccgaccaaaagagaaggagaggctccatggcttcttgcccttgagcttgttcatggcattgaggttcaaagtggcctcctcctcactctgcccaccggacaagaagacaatggccggaacagcaggaggcactgttcgctgcagggcacgaacggtgtactcagcaatgacctccggagcaaccttgggggcatctgatccgggggtgaccatgttgggcttcaaca

SEQ ID NO: 220 - DNA, 452 bp, Eucalyptus grandis
acggtcagtaatccacgaaacaaacgaagcacaagtaatagtatcgcagcaaagcctagatccgcccctcagtacttgtagtccttaacatggagagactcggaagcaccctcgccaagttgagcatcacccttgtatgttccaagagttgcgtccgagttggccttgcatcttctgagaagtgcagcctgtgccttgggaatgttctcttcctttccagcccacgccttcaaggtgctctgctgtagggcccgaccaaaagagaaggagaggctccatggcttcttgcccttgagcttgttcatggcattgaggttcaaagtggcctcctcctcactctgcccaccggacaagaagacaatggccggaacagcaggaggcactgttcgctgcagggcacgaacggtgtactcagcaatgacctccggagcaaccttgggggcatctgatcc

SEQ ID NO: 221 - DNA, 289 bp, Eucalyptus grandis
  misc_feature (1)...(289): n = A,T,C or G
ctcagtactngtagtccttaacatggagagactcggaagcaccctcgccaagttgagcatcacccttgnatgttccaagagttgcgtccgagttggccttgcatcttctgagaagtgcagcctgtgccttgggaatgttctcttcctttccagcccacgccttcaaggtgctctgctgtagggcccgaccaaaagagaaggagaggctccatggcttcttgcccttgagcttgttcatggcattgaggttcaaagnggcctcctcctcactctgcccaccggacaagaa

SEQ ID NO: 222 - DNA, 460 bp, Eucalyptus grandis
ggatcgccgggcagcagtccttcgccccgcgcccccggtcgtccgccgcccgcttccccgcccgccgcgtctccgccccgatccgcgccgccgcttactccgacgagctcgtccagaccgccaaatccattgcatctcctggtcgtggtatccttgccattgatgagtcaaatgcaacatgtgggaaaaggttagcatccatcgggttggacaacactgaggtcaatcgtcaagcttatagacaacttctgttgaccacgcctggtctgggtgaatacatctctggtgccattttgtttgaggagacactttaccaatcgacaacagatgggaagaaatttgttgactgcctgcgtgaggagaaaattgttccaggcattaaagttgacaagggtttggttcctcttcctggatccaataatgaatcctggtgccaaggcttggatggattggcttcaag

SEQ ID NO: 223 - DNA, 373 bp, Eucalyptus grandis
cgtccctcagtacttgtagtccttaacatggagagactcggaagcaccctcgccaagttgagcatcacccttgtatgttccaagagttgcgtccgagttggccttgcatcttctgagaagtgcagcctgtgccttgggaatgttctcttcctttccagcccacgccttcaaggtgctctgctgtagggcccgaccaaaagagaaggagaggctccatggcttcttgcccttgagcttgttcatggcattgaggttcaaagtggcctcctcctcactctgcccaccggacaagaagacaatggccggaacagcaggaggcactgttcgctgcagggcacgaacggtgtactcagcaatgacctccggacaacct

SEQ ID NO: 224 - DNA, 524 bp, Eucalyptus grandis
ggatcgccgggcagcagtccttcgccccgcgcccccggtcgtccgccgcccgcttccccgcccgccgcgtctccgccccgatccgcgccgccgcttactccgacgagctcgtccagaccgccaaatccattgcatctcctggtcgtggtatccttgccattgatgagtcaaatgcaacatgtgggaaaaggttagcatccatcgggttggacaacactgaggtcaatcgtcaagcttatagacaacttctgttgaccacgcctggtctgggtgaatacatctctggtgccattttgtttgaggagacactttaccaatcgacaacagatgggaagaaatttgttgactgcctgcgtgaggagaaaattgttccaggcattaaagttgacaagggtttggttcctcttcctggatccaataatgaatcctggtgccaaggcttggatggattggcttcaaggtccgctgaatactacaagcaaggtgctcgttttgccaaatggaggacagtggttagcattcct

SEQ ID NO: 225 - DNA, 332 bp, Eucalyptus grandis
acggtcagtaatccacgaaacaaacgaagcacaagtaatagtatcgcagcaaagcctagatccgcccctcagtacttgtagtccttaacatggagagactcggaagcaccctcgccaagttgagcatcacccttgtatgttccaagagttgcgtccgagttggccttgcatcttctgagaagtgcagcctgtgccttgggaatgttctcttcctttccagcccacgccttcaaggtgctctgctgtagggcccgaccaaaagagaaggagaggctccatggcttcttgcccttgagcttgttcatggcattgaggttcaaagtggcctcctc

SEQ ID NO: 226 - DNA, 362 bp, Eucalyptus grandis; identical to SEQ ID NO: 217

SEQ ID NO: 227 - DNA, 506 bp, Eucalyptus grandis
gtcactcccggcgctgagtgcaaagagagggccactccccagcaagtcgccgagtacaccctcaagctcctccaccgcaggatcccgcctgccgttcccggaatcatgttcttgtctggtgggcaatccgaggtcgaagcaaccctgaacctgaacgcgatgaaccagtccccgaacccatggcacgtgtccttctcctacgctagagccctccagaacacctgcttgaagacgtggggaggcaggcccgagaacgtgaaggccgctcaggatacgctcctggtccgtgccaaggccaactccctcgcccagctcggcaagtacaccggtgaaggcgagtctgaggaggccaagaagggaatgttcgtcaagggatacgtgtactaaggcgatgcactgaaactccatgagctcagaagatgatcacaggtttagttatgataatgatggtggcggatggagcattggaagctatgaagaagtagaacagctaattcctccttcct

SEQ ID NO: 228 - DNA, 283 bp, Eucalyptus grandis
ttgacaagggtttggttcctcttcctggatccaataacgaatcctggtgccaaggcttggatggattggcttcaaggtccgctgaatactacaagcaaggtgctcgttttgccaaatggaggacagtggttagcattccttgtggtccctctgctcttgcagtaaaagaagctgcgtggggacttgcacgatatgctgccatctctcaggataatggccttgtgcccattgttgaacctgagattcttcttgatggagaccaccctattgagaggactcttga

SEQ ID NO: 229 - DNA, 450 bp, Eucalyptus grandis
gtcactcccggcgctgagtgcaaagagagggccactccccagcaagtcgccgagtacaccctcaagctcctccaccgcaggatcccgcctgccgttcccggaatcatgttcttgtctggtgggcaatccgaggtcgaagcaaccctgaacctgaacgcgatgaaccagtccccgaacccatggcacgtgtccttctcctacgctagagccctccagaacacctgcttgaagacgtggggaggcaggcccgagaacgtgaaggccgctcaggatacgctcctggtccgtgccaaggccaactccctcgcccagctcggcaagtacaccggtgaaggcgagtctgaggaggccaagaagggaatgttcgtcaagggatacgtgtactaaggcgatgcactgaaactccatgagctcagaagatgatcacagggtttagttatgataatgatg

SEQ ID NO: 230 - DNA, 417 bp, Eucalyptus grandis
gtcactcccggcgctgagtgcaaagagagggccactccccagcaagtcgccgagtacaccctcaagctcctccaccgcaggatcccgcctgccgttcccggaatcatgttcttgtctggtgggcaatccgaggtcgaagcaaccctgaacctgaacgcgatgaaccagtccccgaacccatggcacgtgtccttctcctacgctagagccctccagaacacctgcttgaagacgtggggaggcaggcccgagaacgtgaaggccgctcaggatacgctcctggtccgtgccaaggccaactccctcgcccagctcggcaagtacaccggtgaaggcgagtctgaggaggccaagaagggaatgttcgtcaagggatacgtgtactaaggcgatgcactgaaactccatgagctcaga

SEQ ID NO: 231 - DNA, 663 bp, Eucalyptus grandis
aaatggcctgcgccagcttcgccaagctcaacgccacctcctcccagtggatcgccgggcagcagtccttcgccccgcgcccccggtcgtccgccgcccgcttccccgcccgccgcgtctccgccccgatccgcgccgccgcttactccgacgagctcgtccagaccgccaaatccattgcatctcctggtcgtggtatccttgccattgatgagtcaaatgcaacatgtgggaaaaggttagcatccatcgggttggacaatactgaggtcaatcgtcaagcttatagacaacttctgttgaccacgcctggtctgggtgaatacatctctggtgccattttgtttgaggagacactttaccaatcgacaacagatgggaagaaatttgttgactgcctgcgtgaggagaaaattgttccaggcattaaagttgacaagggtttggttcctcttcctggatccaataacgaatcctggtgccaaggcttggatggattggcttcaaggtccgctgaatactacaagcaaggtgctcgttttgccaaatggaggacagtggttagcattccttgtggtccctctgctcttgcagtaaaagaagctgcgtggggacttgcacgatatgctggcatctctcaggataatggccttgtgcccattg

SEQ ID NO: 232 - DNA, 435 bp, Eucalyptus grandis
gcttattatcctagtacaaaaataggatatctccagacacctatttttctcaaatgaaaagcagaaaataccgccagcaaaagcaccttagtacttgtaatccttaacatggagactttcaacagctccctcgccaagctttgcgtcacccttgtaagtaccaagagttgcctctgagtttgccttgcacctagtaaataatgcagcctgtgccttgggcacgttctcctcctttccagcccaagacttcaaagtgctctgctgaagagcccgtccaaaggagaaggaaagagaccatggtttcttgcccttgagcttgttcatggcattgaggttgagggttgcctccttctcactctgcccaccagacaaaaacacaacggcagggacagccggaggcatagtacgttgaaaggcacgaacagtgtactcagc

SEQ ID NO: 233 - DNA, 352 bp, Eucalyptus grandis
acttgtagtccttaacatggagagactcggaagcaccctcgccaagttgagcatcacccttgtatgttccaagagttgcgtccgagttggccttgcatcttctgagaagtgcagcctgtgccttgggaatgttctcttcctttccagcccacgccttcaaggtgctctgctgtagggcccgaccaaaagagaaggagaggctccatggcttcttgcccttgagcttgttcatggcattgaggttcaaagtggcctcctcctcactctgcccaccggacaagaagacaatggccggaacagcaggaggcactgttcgctgcagggcacgaacggtgtactcagcaatgacctc

SEQ ID NO: 234 - DNA, 330 bp, Pinus radiata
ctgagtactacaaacagggtgaaagatttgctaaatggcgaacagttgtcagcatacccaatgggccttcggagttagctgtgaaggaagctgcgtggggacttgcacgttatgccgctatctctcaggacaatggtcttgtgcccattgtggagccagagattcttctggatggagaccattgcattgacagaagccttgaagtggcggagaaagtctgggctgaggttttcttttacttggcacagaacaatgtgttgtttgagggtattttgttaaagccaagtatggtgactcctggtgctgagcacaaggagagagcaacccccg

SEQ ID NO: 235 - DNA, 301 bp, Pinus radiata
  misc_feature (1)...(301): n = A,T,C or G
actgnagcacaaggagagagcaacccccgaaaaggttgcagagtacactctaaaaatgcttaagaggagggtgccaccagctgttcctggggttatgttcttgtctggaggacagtctgaggttgaggcaacattgaatttgaatgcaatgaaccaaagcccaaacccatggcatgtttccttttcatatgcacgtgccttgcagaatacatctctcaagacctgaaagggtcttccagagactgttgaagcagctcagagggcgcttcttattcgggccaaggataattctctggcccag

SEQ ID NO: 236 - DNA, 368 bp, Pinus radiata
  misc_feature (1)...(368): n = A,T,C or G
acaaacagggtgcaagttttgctaaatggcgaacagttgtcagcattacccatgggccttcggagttagctgtgaaggaagctgcgtggggacttgcacgttatgccgctatctctcaggacaatggtcttgtgcccattgtggagcnagagattcttctggatggagaccattgcattgacagaagccttgaagtggcggagaaagtctgggctgaggttttcttttacttggcacagaacaatgtgttgtttgagggtattttgttaaagccaagtatggtgactcctggtgctgagcacaaggagagagcaacccccgaaaaggttgcagagtacactctaaaaatgcttaagaggagggtgcca

SEQ ID NO: 237 - DNA, 423 bp, Pinus radiata
gacttgaagaacacggaggcgaaccgacagggcatacaggcagctgctcgttcagcgcgccgggtctcggacagtacatctccggcgccattctcttcgaggaaactctgtaccagtccagcaccgaagcaagaagattgtagacatcctcgtgcaacagaacatagtccccggcatcaaagttgacaagggtctggttcctttggctggttcaaacgacgaatcttggtgccaaggcctagacggcctcgcatcaaggtgcgctgagtattataagcaaggagctcgcttcgccaaatggcgtacagttgtgagcattcccaacggcccctctgctctggccgtgaaagaagccgcatggggtctcggccgcaacgggcaattgctcaggacaacggtctggttccatagtggagcagagat

SEQ ID NO: 238 - DNA, 352 bp, Pinus radiata
  misc_feature (1)...(352): n = A,T,C or G
cttgcattgacagaagccttgaagtggcgganaaagtctgggctgaggttttcttttacttggcacagaacaatgtgttgtttgagggtattttgttaaagcccagtatggtgactcctggtgctgagcacaaggagagagcaacccctgaaaaggttgcagagtacactctaaaaatgcttaagaggagggtgccaccagctgttcctggggttatgttcttgtctggaggacagtctgaggttgaggcaactttgaatttgaatgcaatgaaccaaagcccaaatccatggcatgtttccttttcatatgcacgtgccttgcagaatacatcnctcaagacctggaaggg

SEQ ID NO: 239 - DNA, 427 bp, Pinus radiata
cagcgtccgggccggggcttacagcgaagagctgatcaagacggcgaaaacagtggcgtctcccgggagaggcatcctggcgatggacgagtccaacgccacctgtgggaaacggctggcgtccatcgggcttgagaacacggaggcgaaccgacaggcatacaggcagctgctcgtcagcgcgccgggtctcggacagtacatctccggcgccattctcttcgaggaaactctgtaccagtccagcaccgaaggcaagaagattgtagacatcctcgtgcaacagaacatagtccccggcatcaaagttgacaagggtctggttcctttggctggttcaaacgacgaatcttggtgccaaggcctagacggcctcgcatcaaggtgcgctgagtattataagcaaggagctcgcttcgccaaatgg

SEQ ID NO: 240 - DNA, 470 bp, Pinus radiata
  misc_feature (1)...(470): n = A,T,C or G
gcacaaggagagagcaacccccgaaaaggttgcagagtacactctaaaaatgcttaagaggagggtgccaccagctgttcctggggttatgttcttgtctggaggacagtctgaggttgaggcaacattgaatttgaatgcaatgaaccaaagcccaaacccatggcatgtttccttttcatatgcacgtgccttgcagaatacatctctcaagacctggaagggtcttccagagaatgttgaagcagctcagagggcgcttcttattcgggccaaggctaattctctggcccagcttgggcgatactctgctgaaggtgaaagtgaggagtctaagaagggaatgttcgttaagggatacacatattaagaatgtgggtcatagttttcttacgggaagaactcgttcaatgcggataggttaagcttttatgtttatttanttggcacttacaatcctgaacttttta

SEQ ID NO: 241 - DNA, 396 bp, Pinus radiata
gattgctggttccatcctttttgcaacagaccctataccagtaccacaaccgacgggaggaaatttgttgactgtttgcgagagcagaatattatgcccggcatcaaagttgacaagggtttagttccactgccaggatcaaacaatgaatcttggtgccagggtttggatggattagcctcaagatctgctgagtactacaaacagggtgcaagatttgctaaatggcgaacagttgtcagcatacccaatgggccttcggagttagctgtgaaggaagctgcgtggggacttgcacgttatgccgctatctctcaggacaatggtcttgtgcccattgtggagccagagattcttctggatggagaccattgcattgacagaagcttgaagtgg

SEQ ID NO: 242 - DNA, 273 bp, Pinus radiata
  misc_feature (1)...(273): n = A,T,C or G
aacaatgtgttgtttganggtattttgttaaagccaagtatggtgactcctggtgctgagcacaaggagagagcaacccccgaaaaggttgcagagtacactctaaaaatgcttaagaggagggtgccaccagctgttcctggggttatgttcttgtctggaggacagtctgaggttgaggcaacattgaatttgaatgnaatgaaccaaagcccaaacccatggcatgtttccttttcatatgcacgtgccttgcagaatacatctctcaag

SEQ ID NO: 243 - DNA, 557 bp, Pinus radiata
ggaagctgcgtggggacttgcacgttatgctgctatctctcaggacaatggtcttgtgcccattgtggagccagagattcttctggatggagaccattgcattgacagaagccttgaagtggcggagaaagtctgggctgaggttttcttttacttggcacagaacaatgtgttgtttgagggtattttgttaaagcccagtatggtgactcctggtgctgagcacaaggagagagcaacccctgaaaaggttgcagagtacactctaaaaatgcttaagaggagggtgccaccagctgttcctggggttatgttcttgtctggaggacagtctgaggttgaggcaactttgaatttgaatgcaatgaaccaaagcccaaatccatggcatgtttccttttcatatgcacgtgccttgcagaatacatctctcaagacctggaagggtcttccagagaatgttgaagcagctcagagggcgcttcttattcgggccaaggctaattctctggcccagcttgggcgatactctgctgaaggtgaaagtgaggagtcta

SEQ ID NO: 244 - DNA, 593 bp, Pinus radiata
acgagggtctcggacagtacatctccggcgccattctcttcgaggaaactctgtaccagtccagcaccgaaggcaagaagattgtagacatcctcgtgcaacagaacatagtccccggtatcaaagttgacaagggtctggttcctttggctggttcaaacgacgaatcttggtgccaaggcctagacggcctcgcatcaaggtgcgctgagtattataagcaaggagctcgcttcgccaaatggcgtacagttgtgagcattcccaacggcccctctgctctggccgtgaaagaagccgcatggggtctcgcccgctacgcggcaattgctcaggacaacggtctggttcccatagtggagccagagatcatgttggatggagaacacggcattgagaggactttcgaagtagcgctgaaggtgtggtccgaggtgttcttctacctagcagagaacaacgtgctgttcgaaggcattctgctgaagccaagcatggttacccctggtgcccgaatgtaaggagagggccagtcccgaaactgttgcccaatataccctgaaccttctccgaagaagaattccaccggccgt

SEQ ID NO: 245 - DNA, 485 bp, Pinus radiata
acgagggtctcggacagtacatctccggcgccattctcttcgaggaaactctgtaccagtccagcaccgaaggcaagaagattgtagacatcctcgtgcaacagaacatagtccccggtatcaaagttgacaagggtctggttcctttggctggttcaaacgacgaatcttggtgccaaggcctagacggcctcgcatcaaggtgcgctgagtattataagcaaggagctcgcttcgccaaatggcgtacagttgtgagcattcccaacggcccctctgctctggccgtgaaagaagccgcatggggtctcgcccgctacgcggcaattgctcaggacaacggtctggttcccatagtggagccagagatcatgttggatggagaacacggcattgagaggactttcgaagtagcgctgaaggtgtggtccgaggtgttcttctacctagcagagaacaacgtgctgttcgaaggcattctgctg

SEQ ID NO: 246 - DNA, 477 bp, Pinus radiata
caggatcaaacaatgaatcttggtgccagggtttggatggattagcctcaagatctgctgagtactacaaacagggtgcaagatttgctaaatggcgaacagttgtcagcatacccaatgggccttcggagttagctgtcaaggaagctgcgtggggacttgcacgttatgctgctatctctcaggacaatggtcttgtgcccattgtggagccagagattcttctggatggagaccattgcattgacagaagccttgaagtggcggagaaagtctgggctgaggttttcttttacttggcacagaacaatgtgttgtttgagggtattttgttaaagcccagtatggtgactcctggtgctgagcacaaggagagagcaacccctgaaaaggttgcagagtacactctaaaaatgcttaagaggagggtgccaccagctgtcctggggttatgttcttgtctggaggacagtctga

SEQ ID NO: 247 - DNA, 337 bp, Pinus radiata
gaacatagtccccggcatcaaagttgacaagggtctggttcctttggctggttcaaacgacgaatcttggtgccaaggcctagacggcctcgcatcaaggtgcgctgagtattataagcaaggagctcgcttcgccaaatggcgtacagttgtgagcattcccaacggcccctctgctctggccgtgaaagaagccgcatggggtctcgcccgctacgcggcaattgctcaggacaacggtctggttcccatagtggagccagagatcatgttggatggagaacacggcattgagaggactttcgaagtagcgctgaaggtgtggtccgaggtgttc

SEQ ID NO: 248 - DNA, 452 bp, Pinus radiata
gttttcttttacttggcacagaacaatgtgttgtttgagggtattttgttaaagccaagtatggtgactcctggtgctgagcacaaggagagagcaacccccgaaaaggttgcagagtacactctaaaaatgcttaagaggagggtgccaccagctgttcctggggttatgttcttgtctggaggacagtctgaggttgaggcaacattgatttgaatgcaatgaaccaaagcccaaacccatggcatgtttccttttcatatgcacgtgccttgcagaatacatctctcaagacctggaagggtcttccagagaatgttgaagcagctcagagggcgcttcttattcgggccaaggctaattctctggcccagcttgggcgatactctgcttgaaggtgaaagtgaggagtctaagaagggaatgttcgttaagggatacacatattaaga

SEQ ID NO: 249 - DNA, 358 bp, Pinus radiata
  misc_feature (1)...(358): n = A,T,C or G
cagaatacacagtaagggctcttcagaggactgtgccacctgcagtgcccggcataatgtttctatctggtgggcagagtgaggaggaggccaccttgaacttgaatgccatgaacaagctgcagaccaagaagccctggacattgncattctcctttggccgggctcttcaggccagcactttgaagacatgggctggaaaggatgagaatattcctgcggctcaggctgccttgttatctcgatgcaaggccaattctgatgccactttgggcaagtatgcaggtgattctgctaagggcaatggtgtttctgagagccttcatgtcaaggactataagtattgattgatgaccac

SEQ ID NO: 250 - DNA, 341 bp, Pinus radiata
aaaactatgacccacattcttaatatgtgtatcccttaacgaacattcccttcttagactcctcactttcaccttcagcagagtatcgcccaagctgggccagagaattagccttggcccgaataagaagcgccctctgagctgcttcaacattctctggaagacccttccaggtcttgagagatgtattctgcaaggcacgtgcatatgaaaaggaaacatgccatgggtttgggctttggttcattgcattcaaattcaatgttgcctcaacctcagactgtcctccagacaagaacataaccccaggaacagctggtggcaccctcctcttaagcatt

SEQ ID NO: 251 - DNA, 408 bp, Pinus radiata
gaaattccagagaaagaccttgtgatctatgaaatgagtgttcgatccttcacagcagacaaatcaagtgggttggaacccagtatacgtggaagctatcttggtgttattgaaaagattcctcatcttctagaacttggcattaatgcagtggaattattaccagtgtttgagtttgacgagtttgaatttcaaaggcatccaaatcctcgtgaccatatgttaaatgtatggggctattctacaatgaacttcttttctccaatgagccggtatgcttccactggtggggggccattagcagcttcattagaatttaagaaaatggtcaaggccttgcatagtgcaggaattgaggttattttggatgtggtttacaaccatacaaatgaagcggatgatgagcat

SEQ ID NO: 252 - DNA, 537 bp, Eucalyptus grandis
ggcgaacaccagcacagtgttatgctgacttcatgcgtgcatttagagacaacttccagcaccttttaggtgaaaccattgtggaaattcaagtaggcatggggccagcaggcgaacttcgttatccatcatacccagagcaaaatgggacatggaaatttccaggaattggagcttttcaatgttacgacaagtacatgctgagtagcttgaaagctgcagccgaggctgctggcaaagcagaatggggccacaccggtccaactgatgctggtcactataacaactggccggaggatgccccattcttcaaaaaggaaggtggaggatggaacagtcaatatggtgaattcttcttgtcgtggtattctcagatgctactggaccatggtgagagaatactctcatctgccaaatcagtctttgagaatacaggaacaaagatttcagtcaaggttgcaggaatttcactggcactatggaacgccgttcgcatgctcctgagctgacagcaggatactacaacacacgttatcg

SEQ ID NO: 253 - DNA, 466 bp, Eucalyptus grandis
gtagcttgaaagctgcagccgaggctgctggcaaagcagaatggggccacaccggtccaactgatgctggtcactataacaactggccagaggatgccccattcttcaaaaaggaaggtggaggatggaacagtcaatatggtgaattcttcttgtcgtggtattctcagatgctactggaccatggtgagagaatactctcatctgccaaatcagtctttgagaatacaggaacaaagatttcagtcaaggttgcaggaattcactggcactatggaacgcgttcgcatgctcctgagctgacagcaggatactacaacacacgttatcgggatggttaccttcccattgcccagatgttggcacggcacggtgctatattcaacttcacttgcatcgaaatgcgtgaccacgagcaaccccaagatgcgctctgcgcacctgagaagctggtgaagcaagtagc

SEQ ID NO: 254 - DNA, 364 bp, Eucalyptus grandis
agatggcgaagaagcatgggttgaaagtgcaggctgtgatgtcgtttcaccagtgcggtggaaacgttggtgactcttgctccatccctctaccaaagtgggctgtggaagaagttgataaagatccagatcttgcatatacagaccagtggggtaggagaaactacgagtacatatcgcttggctgtgacaccctcccggttctcaaagggcgaacacctgtacagtgttatgctgacttcatgcgtgcatttagagacaacttccagcaccttttaggtgaaaccattgtggaaattcaagtaggcatggggccagcaggcgaacttcgttatccatcataccccgagcaaaatgggacatg

SEQ ID NO: 255 - DNA, 379 bp, Eucalyptus grandis
ccagcatatacagaccagtggggtaggagaaactacgagtacatatcgcttggctgggacaccctcccggttctcaaagggcgaacacctgtacagtgttatgctgacttcatgcgtgcatttagagacaacttccagcaccttttaggtgaaaccattgtggaaattcaagtaggcatggggccagcaggcgaacttcgttatccatcataccccgagcaaaatgggacatggaaatttccaggaattggagcttttcaatgttacgacaagtacatgctgagtagcttgaaagctgcatccgaggctgctggcaaagcagaatggggccacaccggtccaactgatgctggtcactataacaactggccagaggatg

SEQ ID NO: 256 - DNA, 370 bp, Eucalyptus grandis
gaagctttcgtgcagagttcaatgactactttgaggatggtataatatcaatgattgggattggattgggtccttgtggggagttacggtacccatcaaaccctgtaaaaaatggttggagatatcctgggataggtgaatttcagtgctacgatcagtatctactgaagaatctcagaaaggcagcagaggcaaggggtcaggctttttgggctagaggtccagataatgcaggttcttataattcacagccacaagaaactggtttcttctgtgatggaggagattacgatggctattttggaaggttcttccttaagtggtactctcaggtgttgattgatcatggtgatagagtacttgccttggc

SEQ ID NO: 257 - DNA, 287 bp, Pinus radiata
ggaaatcttaacaaggacatctactacagagatcggcatggatattctagtgatgagtatctatctgctggagtggatcaaatacctatattatatggacgtacagctgttgaatgctatgaagatttcatggtcagcttcatagacaaatttcaatcactcatgggaaatccaattcaagaaattactattggccttggtccgtcaggtgaactaaggtaccctgcccatcctttttctgatgggagatggaagttccctggtattggagaattccagtgctatga

SEQ ID NO: 258 - DNA, 396 bp, Pinus radiata
gcggtatccatcttatcctgagagtaacggtacatggaaattcccagggattggagcatttcagtgctatgataaggtatggatactagccatttttttttatgaatttccctccagctgtattttagtcatatagttgccctttttatttactagtttggatttccttgtattgcagtatatgatctctaaccttagatccacgtccgaagctgctggaaagcaggagtggggtaatgggggtccaagtgatgcaggtcattacaataactggcctgaggacagcccgtttttccgcagagatggtggctggaacagttcttatggtgagttttttcttgagtggtattctcgtatgcttcttgatcatggagagagaatcctaggagcagctga

SEQ ID NO: 259 - DNA, 420 bp, Pinus radiata
gagggtctcatgcagcagaacttactgctgggtactataacacttcctatagagatgggtatgattcaatcgctgcagtctttgcaagacatggcgcagctttaaatattccttgtatggagatgtttggtagtgaacagccagagatatgctgctgcagtccggagggtctcattaggcagatgagagaagttgcaaggcgaggaaatatacctttaacaggtgaaaatgcaattgaacgctttgataaggaggctttctctcaaattgtgagaaatgcttacaatcgtcctcaggatgtgagagcctttacgtatttccgaatgagggaggcactgttcaggactgataattggaaatcattcgtgaactttgttaagcagatgtacaataagtctcaagatggaggctgcaatggta

SEQ ID NO: 260 - DNA, 378 bp, Pinus radiata
gttctgaaatccaggatgccaatgcaaaggaacttccccttttatgtaattcttcctccggatacaatatccgcttctaacactttaaaccattgcaaggcaattcaagcaggcttacttgccttaaaggctcttggtgtggatggagtggttatgcaagtattttggggcattgtggagagagatgctccaacaaaatatgactggtctgcatatttggctttggtgaaaatggtccaagcagcaggcctgaaagttcaggcttcaatatgctttaatggttgtaaatctagtcaagaaagcttgtctatacctcttccatcttgggttcttacagtgggcaatagtgatccagacatcttcttcacagaccgatcg

SEQ ID NO: 261 - DNA, 303 bp, Pinus radiata
gtgataatgatctggcctacacggatcagtggggcaggcgaaactatgagtatatttcgttgggatgtgataatctcccagttttgaagggaagaacgcctgttcaatgctatgctgattacatgaggagtttcaaggagaattttggggatcttctgggagaaaccattgtggaaattcaagtgggaatgggtcctgcaggagagctgaggtatccatcttatcctgagagtaatggtacctggagattcccaggaattggagcatttcagtgctatgataagtatatggtctctaacctta

SEQ ID NO: 262 - DNA, 385 bp, Pinus radiata
cgaaagagatggatacagacccatagccagaatgctggcaagacatcgggcggtattgaattttacatgcattgaaatgcaggataatgaacaaccgtccgaagccagttgtgggccggaggctcttgtgcgtcaggtattaaatgctggatggaaagaaggtattgaggtttcctgtgaaaatgctttacctagatttgatgaagaagcatatgatcagattgtaaggcaatccagacccgagggaataaacgaaacaggaccgcccaagaagcgaatatctgcttttacctatctaaggctatctcaagaactcatgcaagaacatagctggaaagaattcaacaaattcctgagaagaatgcatgtgagtttggattatcat

SEQ ID NO: 263 - DNA, 330 bp, Pinus radiata
ggcaagatcacctccgctcagtactatgtcaacaacaagggtgttcccgccgagaagggctgccagtggggtgacggctccgagcccatcggtaactgggcccccatgaacctgggtgttggctactctgccggctccacctggttgtccatgttcaagaacgagcctaccacctctgccaacctggacttcaagatcaagattatcggtgacgacctgagcgacaactgcagctacgacggagccggcaacttctacaacaaggccggcctgatcacctctggcaacggctgcactgtcagctcctcctctggcaacgcctacttcgtc

SEQ ID NO: 264 - DNA, 359 bp, Eucalyptus grandis
  misc_feature (1)...(359): n = A,T,C or G
aatttggacatcctgaatggttggactttccaagggaagggaacggtttcagttatgataaatgccggcgaagatttgatctaggagatgctgagtatctaagataccggggaatgcaagaatttgatcaggctatgcagcatgttgaagaagcttatggcttcatgacttctgagcaccaatacatatccagaaaagatgaaggagacagggtcatcgtctttgaaaggggaaatcttgtgtttgtcttcaatttccattggaataatagctacacggactaccatgtaggctgcttgaagcctggaaagntaagattgtcttaaattcagatgacgccttgtttggagggtatagta

SEQ ID NO: 265 - DNA, 451 bp, Pinus radiata
atgcattgggtcactctgatgatggattgcgcaatactgaggacgcgtcacatgactctgaagccaatgctgtgcctatccaggccatcgaagaacaaactactaagccaatgcaaaacagagttgagcttgaagatcggccaaaagttgtccctccacctgggagtggccaaaggatttatgaaatagatccattgttgaataactatcgtgaacatcttgattatcgatttgcgcagtataagaaaacaagagagttgattgataaatatgaaggtggcttggaagcattttctaggggttatgaaaagatgggatttaatagaagtgcggctggaatcacatacagagagtgggcacctggtgctaagggggcatcacttataggagatttcaacaactggaatcccaatgctgatgttatgctaagaacgagtttggagtatgggag

SEQ ID NO: 266 - DNA, 375 bp, Pinus radiata
gagatttcaacaactggaatcccaatgctgatgttatgactaagaacgagtttggagtatgggagatatttttaccaaacaatgcagatggttctccaccaattccccatggatctcgtgttaagatacatatggatacaatttcgggaccaaaggacgcaatccctgcttggattaagtttgctgttcaagctccgggtgagattccatacaatggaatatattatgatccccctcctgaggataaatatgaatttaagtatcctcgaccaaagcagcccaaatcattgcgaatatatgaagcgcatgttggcatgagcagcacggaacccaaaattaatacatatgttgagttcagggatgatgtactaccac

SEQ ID NO: 267 - DNA, 408 bp, Pinus radiata
actctgccatgtcatgtttgcaatcaccttctccagttgttgatcgtgggattgcacttcacaagatgattcatttcataacaatggcactaggtggcgagggctatcttaattttatgggaaatgagtttggtcatccggaatggattgactttccaagggaaggaaatggttggagctatgaaaaatgtagaagacagtggaacttagtggacacagatcacctgagatacaagtttatgaataattttgacaaagccatgaatgagcttgatgagaaatttcatttcctcgcatcgtcaaagcaaatagttagcattgcaaatgaagaagataaggtgattgtttttgaacgaggcgatatagtgtttgttttcaacttccatcccaagaatacatatcctgggt

SEQ ID NO: 268 - DNA, 476 bp, Pinus radiata
ccgagcctcgagtgggcacctacaaagagtttactttaaacactcttcctcgcattaagaagttgggatataatgttatccagctgatggcagttatggaacatgcctactatgcttcctttggttatcaggtcaccagctttttcgctgccagctctcgatatggtactcctgaggagctcaaggagctgatcgataccgcgcattcaatgggcatcactgtattgcttgatgtagtacactctcacgcctgcaagaacgtgctcgatggcttgaaccagttcgatgggactgaccaccagtacttccatggaggaccaaagggataccacgacttgtgggacagtcgtctcttcaactactctcattatgaggttctccgcttcctgatgtctaatctgcgcttctggatggaagagtatcagtttgacggtttccgctttgatggtgttacgagtatgttgtatctgcatcac

SEQ ID NO: 269 - DNA, 313 bp, Pinus radiata
gaacagttcacccgaggatacgagaagtttggactcaacgccaagcccgatggctctatcgtctaccacgaatgggccccgaacgccgtagaggcctccctaatcggagatttcaacaactgggaccgacactctcatgctatgaccaaagatcagtatggtgtctggggaatcacgatccctagcatcaacggacagcctgctatcccccacgattcgaaaataaaggtttcgttcgttattcctggcggcgagcgtatcgagcgtctgcctgcttggatcaagcgcgtcacccaggacctctctgtctcgc

SEQ ID NO: 270 - DNA, 258 bp, Pinus radiata
aacatctatgatgtacacccatcacggattacaggtagcattcactgggaattatgctgagtactttggatttgctactgatgtagatgctgtggtttatttgatgctggttaatgacatgattcatggtctatttccccaggccataacaattggagaagatgtgagtggtatgccaaccttttctcgttctgtacaagatggcggagtgggatttgattatcgactccatatggcagtagctgacaaatggattga

SEQ ID NO: 271 - DNA, 349 bp, Pinus radiata
  misc_feature (1)...(349): n = A,T,C or G
cctatccaggccttcgaagaacaaactactaagccaatgcaaaacagagtngagcttgaagatcggccaaaagttgtccctccacctgggagtggccaaaggatttatgaaatagatccattgttgaataactatcgtgaacatcttgattatcgatttgcgcagtataagaaaacaagagagttgattgataaatatgaaggtggcttggaagcattttctaggggttatgaaaagatgggatttaatagaagtgcggctggaatcacatacagagagtgggcacctggtgctaagggggcatcacttataggagatttcaacaactggaatccaatgctgatgttat

SEQ ID NO: 272 - DNA, 369 bp, Pinus radiata
agcctggaaagtacaaggtggtactggattctgatgaaacaaaatttggcggttttgccagaatagatcacaatgcaaggtttcacactactgagggatggtatgatgatcggccccactcctttcttgtgtatgcaccttgcagaacttcagttgtctatagtcttacagatgattaaatgagaataaaaataagatgtttgccttgtatccaaattttaccggaagggaatacatgatcgcaacatgtttgtatgactgaagaaagcagtatttctaaaacagatatcggaggacatggcttctcccattatcttgtttttccatataaatctcacttgggcataccatctttagttctgtagtcag

SEQ ID NO: 273 - DNA, 327 bp, Eucalyptus grandis
ctcctttctctctctacacatacgctgtttctctctcttctcgcctccttcctccttcgaaccctccacctccacccgcgatcccgatggcttcccgcaacaatggcatctccggcggcaagggcctcatcgtgagcttcggcgagatgctcatcgacttcgtcccgaccgtgtcgggggtctccctggcggaggccccggggttcctcaaggcccccggcggcgcccccgccaacgtcgcgatcgccgtgacccgcctcggcggccggtccgcgttcgtcggcaaagctcggggacgacgagttcgggcaacaatgctggccggat

SEQ ID NO: 274 - DNA, 275 bp, Eucalyptus grandis
acattttaaagcaactatgttgacattctggtgtgcggtatgctcacaatgacaagaactgcattagcttttgttaccaatagagctgatggggagcgagagttcctattttttcgtcatccaagtgcggccatgcttttacatgaatcggaaactagatgttgaacttatcagcaaggcaaagatcttccattatggttctatcagtttgattgatgaaccctgcaaatcggctcatcttgcagcaatgaaaattgccaaaaactcagggagcg

SEQ ID NO: 275 - DNA, 362 bp, Eucalyptus grandis
gcaacaatggcatctccggcggcaagggcctcatcgtgagcttcggcgagatgctcatcgacttcgtcccgaccgtgtcgggggtctccctggcggaggccccggggttcctccaacgcccccggcggcgcccccgcaacgtcgcgatcgccgtgacccgcctcggcggccggtccgagttcgtcggcaagatcggggacgacgagttcgggcacatgctggccgggatcctaaacgacaacggggtcaactgcgacggcatcaacttcgaccagggggcgcggaccgcgctggccttcgtaacgctccgtgccgacggggagcgcgagttcatgttctaccggaacccgagcgccgacatg

SEQ ID NO: 276 - DNA, 543 bp, Eucalyptus grandis
  misc_feature (1)...(543): n = A,T,C or G
gcttagtgtccccacaagcccaaaaattttattaggattatttatatatcttaagaaagcaaaggagtctgtgacaccatacgcaggggagcaatgggaatacagaagcagcaggaatgctaaccagactctcttcaattgaaaatggaagcaagcaacgactagtcctaagggaaaatcagagaatggaagaattggagcttgttcgaatgctttatttcgtgccatcgatcaagctgaggacatcagcctcggtcgggagggcggggatcgctcccttcttggtggtggtgatggctccgcacgcgtttgcaaacttcaggactttcctcaattttccttcatcttcgagaatggagcggtcgtcaanaatgttgcagaggagtgccccgacaaaggaatcaccagccccggttgtgtcaaccgtgttaacatggaatgcttcnacatgtccatgaaaatgcttggtgtagtatctacaaccgtgctcacccaaagtaacaaggagaagtgtcaagttggggtgccacagtgtcattgcat

SEQ ID NO: 277 - DNA, 163 bp, Eucalyptus grandis
  misc_feature (1)...(163): n = A,T,C or G
agcntttgggacaaggcagatatcattaaagtgagtgatgttgaactggagttcctcacagggagtgacaagattgatgatgaaaatgcaatgacactgtggcaccccaacttgacacttctccttgttactttgggtgagcacggttgtagatactacacca

SEQ ID NO: 278 - DNA, 270 bp, Eucalyptus grandis
  misc_feature (1)...(270): n = A,T,C or G
cacggttgacacaaccggggctggtgattcctttgtcggggcactcctctgcaacattgttgacgaccgctccattctcgaagatgaaggaaaattgaggaaagtcctgaagtttgcaaacgcgtgcggancatcaccaccaccaagaagggagcgatccccgccctcccgaccgaggctgatgtcctcagcttgatcgatggcacgaaataaagcattcgaacaagctccaattcttccattctctgattttcccttaggactagtcgt

SEQ ID NO: 279 - DNA, 201 bp, Eucalyptus grandis
cacggttgcacacaaccggggctggtgattcctttgtcggggcactcctctgcaacattgttgacgaccgctccattctcgaagatgaaggaaaattgaggaaagtcctgaagtttgcaaacgcgtgcggagccatcaccaccaccaagaagggagcgatccccgccctcccgaccgaggctgatgtcctcagcttgattg

SEQ ID NO: 280 - DNA, 319 bp, Eucalyptus grandis
  misc_feature (1)...(319): n = A,T,C or G
gcgccgacggggagcgcgagttcatgttctaccggaacccgagcgccgacatgntgctcaagcccgaggagctcaacctcgagctgatcagatctgcgaaagtctttcattatggatccatcagtttgattgtggagccatgcagatccgcccatcttgaagcaatgcaagttgccaaggacgctggggctctgctctcctatgatccaaacctcagactaccattgtggccatcacctgaggaggctcgtgagcagatcaagagcatttggggacaaaggcagatatcatttaaaagtggagtgattgttgaactgga

SEQ ID NO: 281 - DNA, 446 bp, Eucalyptus grandis
  misc_feature (1)...(446): n = A,T,C or G
gcgatcccgatggcttcccgcaacaatggcatctccggcggcaagggcctcatcgtgagcttcggcgagatgctcattgacttcgtcccgaccgtgtcgggggtctccctggcggaggccccggggttcctcaaggcccccggcggcgcccccgccaacgtcgcgatcgccgtgacccgcctcggcggccggtccgcgttcgtcggcaagctcggggacgacgagttcgggcacatgctggccgggatcctgaaggagaacggggtcaactgcgacggcatcaacttcgaccagggggcgcgtgaccgcgctggccttcgtcacgctccgcgccgacggggagcgcgagttcatgttctaccggaacccgagcgccgacatgctgctcaagcccgaggagctcaacctcgagctgattangatctgcgaaagtctttcattatgga

SEQ ID NO: 282 - DNA, 369 bp, Eucalyptus grandis
tccaaagaattcagcacgagcttcgaccagggggcgcggaccgcgctggccttcgtcacgctccgcgccgacggggagcgcgagttcatgttctaccggaacccgagcgccgacatgctgctcaagcccgaggagctcaacctcggggctgatcagatctgcgaaagtctttcattatggatccatcagtttgattgtggagccatgcagatccgcccatcttgaagcaatgcaagttgccaaggacgctggggctctgctctcctatgatttaaacctcagactaccattgtggccatcacctgaggaggctcgtgagcagatcaagagcatttgggacaaggcagatatcattaaagtgagtgatgt

SEQ ID NO: 283 - DNA, 583 bp, Eucalyptus grandis
ccgcgatcccgatggctttccgcaacaatggcatctccggcggcaagggcctcatcgtgagcttcggcgagatgctcattgacttcgtcccgaccgtgtcgggggtctccctggcggaggccccggggttcctcaaggcccccggcggcgcccccgccaacgtcgcgatcgccgtgacccggcttggcggccggtccgcgttcgtcggcatgctcggggacgacgagttcgggcacatgctggccgggatcctgaaggagaacggggtcaactgcgacggcatcaacttcgaccagggggcgcggaccgcgctggccttcgtcacgctccgcgccgacggggagcgcgagttcatgttctaccggaacccgagcgccgacatgctgctcaagcccgaggagctcaacctcgagctgatcagatctgcgaaagtctttcattatggatccatcagtttgattgtggagccatgcagatccgccatcttgaagcaatgcaagttgccaaggacgctggggctctgctctcctatgatccaaacctcagactaccattgtgggcatcacctgaggaggcttcgtga

SEQ ID NO: 284 - DNA, 305 bp, Eucalyptus grandis
  misc_feature (1)...(305): n = A,T,C or G
ctccttcctccttcgaaccctncacccgcgatcccgatggcttcccgcaacaatggcatctccggcggcaagggcctcatcgtgagcttcggcgagatgctcattgacttcgtcccgaccgtgtcgggggtctccctggcggaggccccggggttcctcaaggcccccggcggcgcccccgccaacgtcgcgatcgccgtgacccgcctcggcggccggtccgcgttcgtcggcaagctcggggacgacgagttcgggcacatgctggccgggatcctgaaaggagaacggggtcaactgcgacg

SEQ ID NO: 285 - DNA, 403 bp, Eucalyptus grandis
tctacacatacgctgtttctctctcttctcgcctcctctgcaaatccatctccttcctccttcgaaccctccacccgcgatcccgatggcttcccgcaacaatggcatctccggcggcaagggcctcatcgtgagcttcggcgagatgctcattgacttcgtcccgaccgtgtcgggggtctccctggcggaggccccggggttcctcaaggcccccggcggcgcccccgccaacgtcgcgatcgccgtgacccgcctcggcggccggtccgcgttcgtcggcaagctcggggacgacgagttcgggcacatgctggccgggatcctgaaggagaacggggtcaactgcgacggcatcaacttcgaccagggggcgcggaccgcgctggccttcgtcacgctc

SEQ ID NO: 286 - DNA, 471 bp, Eucalyptus grandis
gttcctcaaggcccccggcggcgcccccgccaacgtcgcgatcgccgtgacccgcctcggcggccggtccgcgttcgtcggcaagctcggggacgacgagttcgggcacatgctggccgggatcctgaaggagaacggggtcaactgcgacggcatcaacttcgaccagggggcgcggaccgcgctggccttcgtcacgctccgcgccgacggggagcgcgagttcatgttctaccggaacccgagcgccgacatgctgctcaagcccgaggagctcaacctcgagctgatcagatctgcgaaagtctttcattatggatccatcagtttgattgtggagccatgcagatccgcccatcttgaagcaatgcaagttgccaaggacgctggggctctgctctcctatgatccaaacctcagactaccattgtggccatcacctgaggaggttcgtgagcagatcaagagcat

SEQ ID NO: 287 - DNA, 410 bp, Eucalyptus grandis
tctctctctacacatacgctgtttctctctctcctcgcctccttcctccttcgaaccctccacctccaccggcgatcccgatggcttcccgcaacaatggcatctccggcggcaagggcctcatcgtgagcttcggcgagatgctcatcgacttcgtcccgaccgtgtcgggggtctccctggcggaggccccggggttcctcaaggcccccggcggcgcccccgccaacgtcgcgatcgccgtgacccgcctcggcggccggtccgcgttcgtcggcaagctcggggacgacgagttcgggcacatgctggccgggatcctgaaggagaacggggtcaactgcgacggcatcaacttcgaccagggggcgcggaccgcgctggccttcgtcacgctccgcgccgacggg

SEQ ID NO: 288 - DNA, 451 bp, Eucalyptus grandis
cgagttcgggcacatgctggccgggatcctgaaggagaacggggtcaactgcgacggcatcaacttcgaccagggggcgcggaccgcgctggccttcgtcacgctccgcgccgacggggagcgcgagttcatgttctaccggaacccgagcgccgacatgctgctcaagcccgaggagctcaacctcgagctgatcagatctgcgaaagtctttcattatggatccatcagtttgattgtggagccatgcagatccgcccatcttgaagcaatgcaagttgcaaggacgctggggctctgctctcctatgatccaaacctcagactaccattgtggccatcacctgaggaggctcgtgagcagatcaagagcatttgggacaaggcagatatcattaaagtgagtgatgttgaactggagttcctcacagggagtgacaagattgatgatg

SEQ ID NO: 289 - DNA, 361 bp, Eucalyptus grandis
ccatgttaacacggttgacacaaccggggctggtgattcctttgtcggggcactcctctgcaacattgttgacgaccgctccattctcgaagatgaaggaaaattgaggaaagtcctgaagtttgcaaacgcgtgcggagccatcaccaccaccaagaagggagcgatccctgccctcccgaccgaggctgatgtcctcagcttgatcgatggcacgaaataaagcattcgaacaagctccaattcttccattctctgattttcccctaggactagtcgttgcttgcttccattttcaattgaagagagtctggttagcattcctgctgcttctgtattcccattgctcccctgcgtatgg

SEQ ID NO: 290 - DNA, 347 bp, Eucalyptus grandis
  misc_feature (1)...(347): n = A,T,C or G
gcggcaagggcctcatcgcgagctcnagcgagatgctgattgactntgacccgaccgtgtcggtggtctgcctggcggaggccccggggttcctcacggcccccggcggggcccccgccaacgtggcgatcgccgagacccggctggggggccggtccacgttcgtcgggaagctcggggacgacgagttcanccacatgctggccgggatcctgaaggagaacggggtcaactgcgacggcatcaactacnaccagagggcgcggaccgagctgaccttcaacacgctccacgcccactggaagcgctagttcntgttctaccggaacccgagcgcctacatgctg

SEQ ID NO: 291 - DNA, 335 bp, Eucalyptus grandis
ccacccgcgatcccgatggcttcccgcaacaatggcatctccggcggcaagggcctcatcgtgagcttcggcgagatgctcattgacttcgtcccgaccgtgtcgggggtctccctggcggaggccccggggttcctcaaggcccccggcggcgcccccgccaacgtcgcgatcgccgtgacccgcctcggcggccggtccgcgttcgtcggcaagctcggggacgacgagttcgggcacatgctggccgggatcctgaaggagaacggggtcaactgcgacggcatcaacttcgaccagggggcgcggaccgcgctggccttcgtcacgctccg

SEQ ID NO: 292 - DNA, 643 bp, Eucalyptus grandis
  misc_feature (1)...(643): n = A,T,C or G
ccccggcggcgcccccgccaacggcgcgatcgccgtgacccgcctcggcggccggtccgcgttcgtcggcaagctcggggacgacgagttcgggcacatgctggccgggatcctgaaggagaacggggtcaactgcgacggcatcaacttcgaccagggggcgcggaccgcgctggccttcgtcacgctccgcgccgacggggagcgcgagttcatgttctaccggaacccgagcgccgacatgctgctcaagcccgaggagctcaacctcgagctgatcagatctgcgaaagtctttcattatggatccatcagtttgattgtggagccatgcagatccgcccatcttgaagcaatgcaagttgccaaggacgctggggctctgctctcctatgatccaaacctcagactaccattgtggccatcacctgaggaggctcgtgagcagatcaagagcatttgggacaaggcagatatcattaaagtgagtgatgttgaactggagttcctcacagggagtgacaagattgatgatgaaaatgcaatgacactgtggcaccccaacttgacacttctncttgttactttgggtgaacacggtgtagatactacaccaagcattttcatggacatgtggaagcat

SEQ ID NO: 293 - DNA, 300 bp, Eucalyptus grandis
ccacccgcgatcccgatggcttcccgcaacaatggcatctccggcggcaagggcctcatcgtgagcttcggcgagatgctcattgacttcgtcccgaccgtgtcgggggtctccctggcggaggccccggggttcctcaaggcccccggcggcgcccccgccaacgtcgcgatcgccgtgacccgcctcggcggccggtccgcgttcgtcggcaagctcggggacgacgagttcgggcacatgctggccgggatcctgaaggagaacggggtcaactgcgacggcatcaacttcgaccag

SEQ ID NO: 294 - DNA, 329 bp, Pinus radiata
cagagcttgcatgtggatctcatcagagaggaaaaaattttccactatggttcaataagccttatttcagatccttgcaaatcagcacatttggctgcaatcaagatagcaaaagatgctggtgttattctttcatatgatcctaatttgaggctgccgttatggccatcagaagatgcagcccgggcgggtattttgagcatttgggattctgcagacgttataaagctaagtgagcaagagattgtatttttaactgaaggtgccgaatccttgtgatgaatgctgttgtacgtaaactttttcacccaaatctcaagctattgctg

SEQ ID NO: 295 - DNA, 496 bp, Pinus radiata
gtcgttgcttcttactgcattgagtcattggaaaatggtttcagaaaggctctcaatttggaaaagcctgagaagagcttgatcgtttgctttggggagatgctcattgattttgtccccacggtctcggatgtttcgctggctgaagcgcccggattccaaaaggctgcaggtggtgcacctgctaatgtggctgttggaatttccaggctcggtggccgatccgcatttgttggcaaggttggggatgatgagtttgggcgcatgcttgctgacattctgagggaaaacaatgtgatggaccgaggaattagatttgattcccatgccagaaccgcgctggcattcgttactttaaagatgaatggcgagagggaatttatgttctatcgtaatcccagcgctgacatgcttctcaaggaatctgagcttgatgcagagctgatccgagaggcatcgatatttcactatggatcaatcagtctgattgcagagc

SEQ ID NO: 296 - DNA, 473 bp, Pinus radiata
gagcagctgacaggtgaatcaccacttgtggtttgctttggagaaatgctgattgatttcgtcccaacagttgccggattgtcattatctgaagcgcaggccttcaaaaaggctcctggaggtgcacctgctaatgttgctgtttgcatagcaagactaggaggttcatcagcatttattggaaaggttggtgatgacgagtttggatatatgcttgctgatatcttggagaaaaacaatgtaaataataagggcatgcgttttgatgctggagctcgaactgctttggcatttgtgacattaaggagtgatggtgaacgtgaatttatgttttacagaaatccaagtgcagatatgttactcgacgaatcagagcttgatgtggatctcatcagagaggcaaaaattttccactatggttcaataagccttatttcagatccttgcaaatcagcacatttggctgcaatcaa

SEQ ID NO: 297 - DNA, 369 bp, Pinus radiata
cagcagacaggtgaatcaccacttgtggtttgctttggagaaatgctgattgatttcgtcccaacagttgccggattgtcattatctgaagcgcaggccttcaaaaaggctcctggaggtgcacctgctaatgttgctgtttgcatagcaagactaggaggttcatcagcatttattggaaaggttggtgatgacgagtttggatatatgcttgctgatatcttggagaaaaacaatgtaaataataagggcatgcgttttgatgctggagctcgaactgctttggcatttgtgacattaaggagtgatggtgaacgtgaatttatgttttacagaaatccaagtgcagatatgttactcgacgaatca

SEQ ID NO: 298 - DNA, 459 bp, Pinus radiata
gagcagctgacaggtgaatcaccacttgtggtttgctttggagaaatgctgattgatttcgtcccaacagttgccggattgtcattatctgaagcgcaggccttcaaaaaggctcctggaggtgcacctgctaatgttgctgtttgcatagcaagactaggaggttcatcagcatttattggaaaggttggtgatgacgagtttggatatatgcttgctgatatcttggagaaaaacaatgtaaataataagggcatgcgttttgatgctggagctcgaactgctttggcatttgtgacattaaggagtgatggtgaacgtgaatttatgttttacagaaatccaagtgcagatatgttactcgacgaatcagagcttgatgtggatctcatcagagaggcaaaaattttccactatggttcaataagccttatttcagatccttgcaaatcagcacat

SEQ ID NO: 299 - DNA, 417 bp, Pinus radiata
gttctgactcagattgcaagtgacatgtctattcttgaggatgaacacctcccacaaatgcatctcctgcacctgttgtatcaattgcagtcactgataatgtatctacctttccgcgaaaagactttgtatagtatcggcagcctttgggtccatcagttactagaagtaattttaatttggaatgccagagtgacatcaccacttcgtcattatcagagtctcctcccgtcaggaatgccacctcttcatcacttatctttatcaaatccgcttcctcccaaatgctgagaatgcctttgcgctggtgccgaattcggcacgaggcagagcgggtgaattttctgtttgggggtaggaaatggaaaaaacttggaggacatggaggaaaactctttaagattcctgaagcactca

SEQ ID NO: 300 - DNA, 359 bp, Pinus radiata
gtccgtgatcagactaattgatccataatggaaaattttagcctgttggattaagtccacgtcaagctcagattcagttagtagcatatcagcactgggattccggaaaaacataaactctcgttcaccatcggctttcaatgtgacaaaagccaaagcagttcgagcaccaagatcaaagcgcatccctttgtgctccacattattttctttcagaatatccacaagcatgcgcccaaattcatcctcgccaaccttccctataaatgcggatgaacctccgagccttgctataccaacggcaacattcgcaggggctccccctggagctttcttgaatgcaggagcatcagccaatg

SEQ ID NO: 301 - DNA, 374 bp, Pinus radiata
gtccgtgatcagactaattgatccataatggaaaattttagcctgttggattaagtccacgtcaagctcagattcagttagtagcatatcagcactgggattccggaaaaacataaactctcgttcaccatcggctttcaatgtgacaaaagccaaagcagttcgagcaccaagatcaaagcgcatccctttgtgctccacattattttctttcagaatatccacaagcatgcgcccaaattcatcctcgccaaccttccctataaatgcggatgaacctccgagccttgctataccaacggcaacattcgcaggggctccccctggagctttcttgaatgcaggagcatcagccaatgacactccattgaccg

SEQ ID NO: 302 - DNA, 339 bp, Pinus radiata
gtccatcagttactagaagtaattttaatttggaatgccagagtgacatcaccacttcgtcattatcagagtctcctcccgtcaggaatgccacctcttcatcacttatctttatcaaatccgcttcctcccaaatgctgagaatgcctttgcgagcctcatcatcagatggccaaagaggcaatctcacattcgggtcataggagagcagggcacctccttttctcgcaattttcatggctgcaagatgagctgacctagttggctctgcaatcagactgattgatccatagtgaaatatcgatgcctctcggatcagctctgcatcaagctcagatt

SEQ ID NO: 303 - DNA, 402 bp, Pinus radiata
gtccatcagttactagaagtaattttaatttggaatgccagagtgacatcaccacttcgtcattatcagagtctcctcccgtcaggaatgccacctcttcatcacttatctttatcaaatccgcttcctcccaaatgctgagaatgcctttgcgagcctcatcatcagatggccaaagaggcaatctcacattcgggtcataggagagcagggcacctccttttctcgcaattttcatggctgcaagatgagctgacctagttggctctgcaatcagactgattgatccatagtgaaatatcgatgcctctcggatcagctctgcatcaagctcagattccttgagaagcatgtcagcgctgggattacgatagaacataaattccctctcgccattcatct

SEQ ID NO: 304 - DNA, 468 bp, Pinus radiata
gcgaatgttgccgttggtatagcaaggctcggaggttcatccgcatttatagggaaggttggcgaggatgaatttgggcgcatgcttgtggatattctgaaagaaaataatgtggagcacaaagggatgcgctttgatcttggtgctcgaactgctttggcttttgtcacattgaaagccgatggtgaacgagagtttatgtttttccggaatcccagtgctgatatgctactaactgaatctgagcttgacgtggacttaatccaacaggctaaaattttccattatggatcaattagtctgatcacggacccctgtaagtctgcgcatttggctgccatgaaaatcgctagagacacgggcagtatactgtcttatgatcccaatctcagattgccattatggccatcagcgagcgaagctcgggagggtattttaagcatatgggataaagcagatttaattaag

SEQ ID NO: 305 - DNA, 502 bp, Pinus radiata
gcgaatgttgccgttggtatagcaaggctcggaggttcatccgcatttatagggaaggttggcgaggatgaatttgggcgcatgcttgtggatattctgaaagaaaataatgtggagcacaaagggatgcgctttgatcttggtgctcgaactgctttggcttttgtcacattgaaagccgatggtgaacgagagtttatgtttttccggaatcccagtgctgatatgctactaactgaatctgagcttgacgtggacttaatccaacaggctaaaattttccattatggatcaattagtctgatcacggacccctgtaagtctgcgcatttggctgccatgaaaatcgctagagacacgggcagtatactgtcttatgatcccaatctcagattgccattatggccatcagcgagcgaagctcgggagggtattttaagcatatgggataaagcagatttaattaaggttagtgaagaggaagtaggatttttaacaggag

SEQ ID NO: 306 - DNA, 379 bp, Pinus radiata
gaactgctttggcatttgtgacattaaggagtgatggtgaacgtgaatttatgttttacagaaatccaagtgcagatatgttactcgacgaatcagagcttgatgtggatctcatcagagaggcaaaaattttccactatggttcaataagccttatttcagatccttgcaaatcagcacatttggctgcaatcaagatagcaaaagatgctggtgttattctttcatatgatcctaatttgaggctgccgttatggccatcagaagatgcagcccgggcgggtattttgagcatttgggattctgcagacgttataaagctaagtgagcaagagattgtatttttaactgaaggtgaagatccttgtgatgatgctgt

SEQ ID NO: 307 - DNA, 233 bp, Pinus radiata
agtttatgtttttccggaatcccagtgctgatatgctactaactgaatctgagcttgacgtggacttaatccaacaggctaaaattttccattatggatcaattagtctgatcacggacccctgtaagtctgcgcatttggctgccatgaaaatcgctagagacacgggcagtatactgtcttatgatcccaatctcagattgccattatggccatcagcgagccgaagctcg

SEQ ID NO: 308 - DNA, 377 bp, Pinus radiata
gaaagctccagggggagcccctgcgaatgttgccgttggtatagcaaggctcggaggttcatccgcatttatagggaaggttggcgaggatgaatttgggcgcatgcttgtggatattctgaaagaaaataatgtggagcacaaagggatgcgctttgatcttggtgctcgaactgctttggcttttgtcacattgaaagccgatggtgaacgagagtttatgtttttccggaatcccagtgctgatatgctactaactgaatctgagcttgaccgtggacttaatccaacaggctaaaattttccattatggatcaattaatctgatcacggacccctgtaagtctgcgcatttggctgccatgaaaatcgctaga

SEQ ID NO: 309 - DNA, 517 bp, Pinus radiata
gtcccaacagttgccggattgtcattatctgaagcgcaggccttcaaaaaggctcctggaggtgcacctgctaatgttgctgtttgcatagcaagactaggaggttcatcagcatttattggaaaggttggtgatgacgagtttggatatatgcttgctgatatcttggagaaaaacaatgtaaataataagggcatgcgttttgatgctggagctcgaactgctttggcatttgtgacattaaggagtgatggtgaacgtgaatttatgttttacagaaatccaagtgcagatatgttactcgacgaatcagagcttgatgtggatctcatcagagaggcaaaaattttccactatggttcaataagccttatttcaaatccttgcaaatcagcacatttggctgcaatcaagatagcaaaagatgctggtgttattctttcatatgatcctaatttgagctgccgtatggcatcaaaagatgcacccgggcggtatttttgactttgggattctt

SEQ ID NO: 310 - DNA, 360 bp, Pinus radiata
gttgtacggaaccttttccatccaaacctcaaattgcttctcgtgactgaaggccagcaaggatgtagatattacaccaaggattttagcggaagagtgaaaggcctggcagtggaagctgtagacaccactggtgctggagatgcgtttgtgagtggaattcttagtcaattggctaaggacctcactttattgcagaagagagcctgagagaggcattgaagtttgcaaatgcctgtggtgcaattacggttactgagaggggggcaatccctgctcttcccacacgagaagcagtgctagcagctctgacaaaagttcttgcctgagctttttatctacatttctttttttgcatag

SEQ ID NO: 311 - DNA, 438 bp, Pinus radiata
cggccggcttcaggtttaatagtgaaagcattgagtgaagacgacaataatgggaaaccatctgaggtgtccccgctagtggtgtgctttggggaattgctgatcgattttgtcccaacggtcaatggagtgtcattggctgatgctcctgcattcaagaaagctccagggggagcccctgcgaatgttgccgttggtatagcaaggctcggaggttcatccgcatttatagggaaggttggcgaggatgaatttgggcgcatgcttgtggatattctgaaagaaaataatgtggagcacaaagggatgcgctttgatcttggtgctcgaactgctttggcttttgtcacattgaaagccgatggtgaacgagaagtttatgtttttccggaatcccagtgctgatatgctactaactgaatctgacttgacgtggac

SEQ ID NO: 312 - DNA, 294 bp, Pinus radiata
gtgaacgtgaatttatgttttacagaaatccaagtgcagatatgttactcgacgaatcagagcttgatgtggatctcatcagagaggcaaaaattttccactatggttcaataagccttatttcagatccttgcaaatcagcacatttggctgcaatcaagatagcaaaagatgctggtgttattctttcatatgatcctaatttgaggctgccgttatggccatcagaagatgcagcccgggcgggtattttgagcatttgggattctgcagacgttataaagctaagtgagc

SEQ ID NO: 313 - DNA, 510 bp, Pinus radiata
tcaaggttcaacacaaaaggaataccttcgaacggccggcttcaggtttaatagtgaaagcattgagtgaagacgacaataatgggaaaccatctgaggtgtccccgctagtggtgtgctttggggaattgctgatcgattttgtcccaacggtcaatggagtgtcattggctgatgctcctgcattcaagaaagctccagggggagcccctgcgaatgttgccgttggtatagcaaggctcggaggttcatccgcatttatagggaaggttggcgaggatgaatttgggcgcatgcttgtggatattctgaaagaaaataatgtggagcacaaagggatgcgctttgatcttggtgctcgaactgctttggcttttgtcacattgaaagccgatggtgaacgagagtttatgtttttccggaatcccagtgctgatatgctactaactgaatctgagcttgacgtggacttaatccaacaggctaaaattttccattatggatcaatta

SEQ ID NO: 314 - DNA, 487 bp, Pinus radiata
  misc_feature (1)...(487): n = A,T,C or G
ttttcgttcattatattcattgccatcatattcctgttcttgtctgtcctatcacattattcagttagattgtaagtttgcggccatggctatgcgcgttccggcaaattccattgctccattcgacaataatgtcgagaaatctgcacccccgctgacgaattcgagcacatcgtcattcgtcgcatcgggccgcctcgcgaaggttaatcgatcggcttcgttgtcgctcactattcggcaacggaggtctcaaggttctgcaagagcatcagtagcagacaacaaagagcagctgacaggtgaatcaccacttgtggtttgctttggagaaatgctgattgatttcgtcccaacagttgccggattgtcattatctgaagcgcaggccttcaaaaaggctcctggaggtgcacctgctaatgttgctgtttgcatagcaagactaggagggtcatcngcntttattggaaaggttggtgatgac

SEQ ID NO: 315 - DNA, 421 bp, Pinus radiata
cttcaggtttaatagtgaaagcattgagtgaagacgacaataatgggaaaccatctgaggtgtccccgctagtggtgtgctttggggaattgctgatcgattttgtcccaacggtcaatggagtgtcattggctgatgctcctgcattcaagaaagctccagggggagcccctgcgaatgttgccgttggtatagcaaggctcggaggttcatccgcatttatagggaaggttggcgaggatgaatttgggcgcatgcttgtggatattctgaaagaaaataatgtggagcacaaagggatgcgctttgatcttggtgctcgaactgctttggcttttgtcacattgaaagccgatggtgaacgagagtttatgtttttccggaatcccagtgctgatatgctactaactgaatctgagct

SEQ ID NO: 316 - DNA, 420 bp, Pinus radiata
ggacccctgtaagtctgcgcatttggctgccatgaaaatcgctagagacacgggcagtatactgtcttatgatcccaatctcagattgccattatggccatcagcgagcgaagctcgggagggtattttaagcatatgggataaagcagatttaattaaggttagtgaagaggaagtaggatttttaacaggaggtgcagatccattcgacgacactgttgtacgcaaccttttccatccaaacctcaaattgcttctcgtgactgaaggccagcaaggatgtagatattacaccaaggattttagcggaagagtgaaaggcctggcagtggaagctgtagacaccactggtgctggagatgcgtttgtgagtggaattcttagtcaattggctaaggacctcactttattgcagaaaga

SEQ ID NO: 317 - DNA, 499 bp, Pinus radiata
ctgcactgagtcattggaaaatggtttcagaaaggctctcaatttggaaaagcctgagaagagcttgatcgtttgctttggggagatgctcattgattttgtccccacggtctcggatgtttcgttggctgaagcgcccggattccaaaaggctgcaggtggtgcacctgctaatgtggctgttggaatttccaggctcggtggccgatccgcatttgttggcaaggttggggatgatgagtttgggcgcatgcttgctgacattctgagggaaaacaatgtgatggaccgaggaattagatttgattcccatgccagaaccgcgctggcattcgttactttaaagatgaatggcgagagggaatttatgttctatcgtaatcccagcgctgacatgcttctcaaggaatctgagcttgatgcaaagctgatcccagaggcatcgatatttcattatggatcaatcagtctgattgcagagcccactaggtcagctcat

SEQ ID NO: 318 - DNA, 364 bp, Pinus radiata
gcgaagctcgggagggtattttaagcatatgggataaagcagatttaattaaggttagtgaagaggaagtaggatttttaacaggaggtgcagatccattcgacgacactgttgtacgcaaccttttccatccaaacctcaaattgcttctcgtgactgaaggccagcaaggatgtagatattacaccaaggattttagcggaagagtgaaaggcctggcagtggaagctgtaaacaccactggtgctggagatgcgtttgtgagtggaattcttagtcaattggctaaggacctcactttattgcagaaagaagagggcctgagagaggcattgaagtttgcaaatgcctgtggtgcaattac

SEQ ID NO: 319 - DNA, 298 bp, Eucalyptus grandis
aagcgattcgtttcttcgagctcaacaccggggccaagatcccctccgtcgggctgggcacttggcagaccggtgacggcgtcgacgccgtcaccaccgccatcaaggttgggtacaggcatattgattgtgctcaagcttatcaaaatgagaaggagattggtactgctctccagaaattattcagcgagggtgtggtgaagcgcgaggatttgtggatcacatccaagctatggtgtgctgatcacgcaccagaaagatgttcccaaggcatttagaaagaaccctggagaaactt

SEQ ID NO: 320 - DNA, 261 bp, Eucalyptus grandis
gttttcgagagagaaatggcgaaggcgattcgtttcttcgagctcaacaccggggccaagatcccctccgtcgggctgggcacttggcagaccggtgacggcgtcgacgccgtcaccaccgccatcaaggttgggtacaggcatattgattgtgctcaagcttatcaaaatgagaaggagattggtactgctctccagaaattattcagcgagggtgtggtgaagcgcgaggatttgtggatcacatccaagctatggtgt

SEQ ID NO: 321 - DNA, 450 bp, Eucalyptus grandis
ctagggtgagatcgaagctcgcgttttcgagagagaaatggcgaaggcgattcgtttcttcgagctcaacaccggggccaagatcccctccgtcgggctgggcacttggcagaccggtgacggcgtcgacgccgtcaccaccgccatcaaggttgggtacaggcatattgattgtgctcaagcttatcaaaatgagaaggagattggtactgctctccagaaattattcagcgagggtgtggtgaagcgcgaggatttgtggatcacatccaagctatggtgtgctgatcacgcaccagaagatgttcccaaggcattagaaagaaccctggagaacttgcagctcgagtatctggatctttacctgatccactggccggtgagcatgaggaaggctcaatttggcttcaagcctgaaaaccttacccagccggacatacccagtacgtg

SEQ ID NO: 322 - DNA, 347 bp, Eucalyptus grandis
cgagagagaaatggcgaaggcgattcgtttcttcgagctcaacaccggggccaagatcccctccgtcgggctgggcacttggcagaccggtgacggcgtcgacgccgtcaccaccgccatcaaggttgggtacaggcatattgattgtgctcaagcttatcaaaatgagaaggagattggtactgctctccagaaattattcagcgagggtgtggtgaagcgcgaggatttgtggatcacatccaagctatggtgtgctgatcacgcaccagaagatgttcccaaggcattagaaagaaccctggagaacttgcagctcgagtatctggatctttacctgatccact

SEQ ID NO: 323 - DNA, 414 bp, Eucalyptus grandis
cacgagtcggctggcgaagtagtcgaagtaggtgaaggcgtaacccaatggaaagtcggcgaccgagtcgctatcgaggctggagtaccttgttcccaacctgcttgcgatgcgtgtcgtactggccgatacaacgcatgcccagatgtcgttttcttctcaaccccgccgttccatggcacattgacgcgctggcaccttcatccggcacagtggttgcaccgtcttccggataatgtttctttcgaagagggcgccttgtgcgaaccactcgctgtcgcattggccggcatcgagcgttccggtctcagactcggagatcccgtccttgtctgtggtgctggaccaataggcctaatctctctactttcggcccgtgctgcgggtgcagagcctattgttataacggacctt

SEQ ID NO: 324 - DNA, 464 bp, Eucalyptus grandis
cacgagtcggctggcgaagtagtcgaagtaggtgaaggcgtaacccaatggaaagtcggcgaccgagtcgctatcgaggctggagtaccttgttcccaacctgcttgcgatgcgtgtcgtactggccgatacaacgcatgcccagatgtcgttttcttctcaaccccgccgttccatggcacattgacgcgctggcaccttcatccggcacagtggttgcaccgtcttccggataatgtttctttcgaagagggcgccttgtgcgaaccactcgctgtcgcattggccggcatcgagcgttccggtctcagactcggagatcccgtccttgtctgtggtgctggaccaataggcctaatctctctactttcggcccgtgctgcgggtgcagagcctattgttataacggaccttttccaaagccgtctggactttgcgaagaagctggtgcctggcgttcgcac

SEQ ID NO: 325 - DNA, 368 bp, Eucalyptus grandis
cacgagtcggctggcgaagtagtcgaagtaggtgaaggcgtaacccaatggaaagtcggcgaccgagtcgctatcgaggctggagtaccttgttcccaacctgcttgcgatgcgtgtcgtactggccgatacaacgcatgcccagatgtcgttttcttctcaaccccgccgttccatggcacattgacgcgctggcaccttcatccggcacagtggttgcaccgtcttccggataatgtttctttcgaagagggcgccttgtgcgaaccactcgctgtcgcattggccggcatcgagcgttccggtctcagactcggagatcccgtccttgtctgtggtgctggaccaataggcctaatctctctact

SEQ ID NO: 326 - DNA, 350 bp, Eucalyptus grandis
ctagggtgagatcgaagctcgcgttttcgagagagaaatggcgaaggcgattcgtttcttcgagctcaacaccggggccaagatcccctccgtcgggctgggcacttggcagaccggtgacggcgtcgacgccgtcaccaccgccatcaaggttgggtacaggcatattgattgtgctcaagcttatcaaaatgagaaggagattggtactgctctccagaaattattcagcgagggtgtggtgaagcgcgaggatttgtggatcacatccaagctatggtgtgctgatcacgcaccagaagatgttcccaaggcattagaaagaaccctggagaacttgcagctcgagt

SEQ ID NO: 327 - DNA, 372 bp, Eucalyptus grandis
cttcgagctcaacaccggggccaagatcccctccgtcgggctgggcacttggcagaccggtgacggcgtcgacgccgtcaccaccgccatcaaggttgggtacaggcatattgattgtgctcaagcttatcaaaatgagaaggagattggtactgctctccagaaattattcagcgagggtgtggtgaagcgcgaggatttgtggatcacatccaagctatggtgtgctgatcacgcaccagaagatgttcccaaggcattagaaagaaccctggagaacttgcagctcgagtatctggatctttacctgatccactggccggtgagcatgaggaagggctcaattggcttcaagcctgaaaaccttaccca

SEQ ID NO: 328 - DNA, 333 bp, Eucalyptus grandis
aaatggcgaaggcgattcgtttcttcgagctcaacaccggggccaagatcccctccgtcgggctgggcacttggcagaccggtgacggcgtcgacgccgtcaccaccgccatcaaggttgggtacaggcatattgattgtgctcaagcttatcaaaatgagaaggagattggtactgctctccagaaattattcagcgagggtgtggtgaagcgcgaggatttgtggatcacatccaagctatggtgtgctgatcacgcaccagaagatgttcccaaggcattagaaagaaccctggagaacttgcagctcgagtatctggatctttacctga

SEQ ID NO: 329 - DNA, 377 bp, Eucalyptus grandis
cgcactccttttgcctgccccccacgagcccggagcgggagtagactgagatcgaagctcgcgttttcgagagagaaatggcgaaggcgattcgtttcttcgagctcaacacgggggccaagatcccctccatcgggctgggcacttggcaggccgatcccggcgtcgtggccgaggccgtcaccaccgccacaaaggctgggtacaggcatattgattgtgctcaagcttattacaatgagaaggagattggtactgctctccagaaattattcagcgagggtgtggtgaagcgcgaggatttgtggatcacttccaagctatggtgtactgatcacgcaccggaagatgttcccaaggcaatagacagaaccttg

SEQ ID NO: 330 - DNA, 484 bp, Eucalyptus grandis
aactaatggttcgcttgccaataaggtggtgcatcctgcacatctgtgttacaagctaccggaaaatgtgagcttggaggaaggagcaatgtgtgaacccctcagtgttggtgtacacgcttgtcgccgagcaaatatcaatcctgagaccaacatactcataataggatcagggccgattggccttgttaccttattagcagcccgtgcttttggagctccgagaatcgtcatcactgatgtagacgagtgcagattatcgattgcgaaaatgcttggtgcctctgaggtggttcaagtctcaacagatgttcagctagtggatgaagaagtggcgcgcatccaaaatgcaatgggctgcgacattgatgtgagcttcgattgtgttggctatgacaagacaatgaccacagctttgaatgcgactcgtgctggtggcaaagtgtgcctcatcggactagccttgagcaagatgacagttcct

SEQ ID NO: 331 - DNA, 477 bp, Pinus radiata
ccaaagggaaaaaaaatggggaagggagcaatgtctcagggtaacgaaaatggggaaggtgacaatatggctgcatggctcactggaataaacactcttcgcatccagcccttcaaacttccgcctcttggcccccatgatgcgaaggtgcgcatgaaggctgtgggtatctgtggcagtgacgtccactatttgaggacattacggtgtgcggactttattgtaaaagagccaatggtgattggtcatgagtctgctggaataattgaggaggttggcagtgaagtgaaacatctggttcctggtgaccgcgtactttggagcctggaatatcgtgttggcgttgtgaccaatgtaagcgaggctcctacaatttgtgtcccgagatgaagttttttgcaacacctcccgtgcatggttccttggccaatcagattgttcatcctgcagatttatgtttcaagttgccagataatg

SEQ ID NO: 332 - DNA, 433 bp, Pinus radiata
  misc_feature (1)...(433): n = A,T,C or G
agggtaacgaaaatggggaaggtgacaatatggctgcatggctcactggaataaacactcttcgcatccagcccttcaaacttccgcctcttggcccccatgatgcgaaggtgcgcatganggctgtgggtatctgtggcagtgacgtccactatttgangacattacggtgtgcggactttattgtaaaanagccaatggtgattggtcatgagtctgctggaataattgaggaggttggcagtgaagtgaaacatctggttcctggtgaccgcgtactttggagcctggaatatcgtgttggcgttgtgaccaatgtaagcnaggctcctacaatttgtgtcccgagatgaagttttttgcaacacctcccgtgcatggttccttggccaatcagattgttcatcctgcagatttatgtttcaagttgcca

SEQ ID NO: 333 - DNA, 466 bp, Pinus radiata
gaggaataggaacaggaccctcttttgttgggcacacttgcatctgtctttgttccagcaatgtcaggagcagctgctgcgattacactgaataatggccacaaaatgcccatcattgggcttggagtgtggagaatggagggtcaggaaataagagaccttatcttcaatgcactacacatagggtaccgtcatttcgattgtgcagctgattacaggaatgaaaaggaagttggtcaagcacttgcggaggcctttcagcaaggcttggtgaaacgagaggatatttttattactaccaagctatggaattcagaccatggacatgttcttgaggcatgcaaggacagtttaaagaatctgcagttggaatatttggacctgtacttggttcattttccaatagccacacgacatacaggggttggaacaactgatagtgccttagacgaagatggtgttctcg

SEQ ID NO: 334 - DNA, 483 bp, Pinus radiata
gggtaacgaaaatggggaaggtgacaatatggctgcatggctcactggaataaacactcttcgcatccagcccttcaaacttccgcctcttggcccccatgatgcgaaggtgcgcatgaaggctgtgggtatctgtggcagtgacgtccactatttgaggacattacggtgtgcggactttattgtaaaagagccaatggtgattggtcatgagtctgctggaataattgaggaggttggcagtgaagtgaaacatctggttcctggtgaccgcgtagctttggagcctggaatatcgtgttggcgttgtgaccaatgtaagcgaggctcctacaatttgtgtcccgagatgaagttttttgcaacacctcccgtgcatggttccttggccaatcagattgttcatcctgcagatttatgtttcaagttgccagataatgtaagtctcgaggaaggtgccatgtgtgaaccactcagtgttgg

SEQ ID NO: 335 - DNA, 329 bp, Pinus radiata
  misc_feature (1)...(329): n = A,T,C or G
gggtaacgaaaatggggaaggtgacaatatggctgcatggctcactggaataaacactcttcgcatccagcccttcaaacttccgcctcttggcccccatgatgcgaaggtgcgcatgaaggctgtgggtatctgtggcagngacgtccactatttgaggacattacggtgtgcggactttattgtaaaagagccaatggtgattggtcatgagtctgctggaataattgaggaggttggcagtgaagtgaaacatctggttcctggtgaccgcgtagctttggagcctggaatatcgngttggcgttgngaccaatgtaagcgaggct

SEQ ID NO: 336 - DNA, 419 bp, Pinus radiata
ctcagggtaacgaaaatggggaaggtgacaatatggctgcatggctcactggaataaacactcttcgcatccagcccttcaaacttccgcctcttggcccccatgatgcgaaggtgcgcatgaaggctgtgggtatctgtggcagtgacgtccactatttgaggacattacggtgtgcggactttattgtaaaagagccaatggtgattggtcatgagtctgctggaataattgaggaggttggcagtgaagtgaaacatctggttcctggtgaccgcgtagctttggagcctggaatatcgtgttggcgttgtgaccaatgtaagcgaggctcctacaatttgtgtcccgagatgaagttttttgcaacacctcccgtgcatggttccttggccaatcagattgttcatcctgcagat

SEQ ID NO: 337 - DNA, 392 bp, Pinus radiata
ctcagggtaacgaaaatggggaaggtgacaatatggctgcatggctcactggaataaacactcttcgcatccagcccttcaaacttccgcctcttggcccccatgatgcgaaggtgcgcatgaaggctgtgggtatctgtggcagtgacgtccactatttgaggacattacggtgtgcggactttattgtaaaagagccaatggtgattggtcatgagtctgctggaataattgaggaggttggcagtgaagtgaaacatctggttcctggtgaccgcgtagctttggagcctggaatatcgtgttggcgttgtgaccaatgtaagcgaggctcctacaatttgtgtcccgagatgaagttttttgcaacacctcccgtgcatggttccttg

SEQ ID NO: 338 - DNA, 362 bp, Pinus radiata
ctaaccaaagggaaaaaaaatggggaagggagcaatgtctcagggtaacgaaaatggggaaggtgacaatatggctgcatggctcactggaataaacactcttcgcatccagcccttcaaacttccgcctcttggcccccatgatgcgaaggtgcgcatgaaggctgtgggtatctgtggcagtgacgtccactatttgaggacattacggtgtgcggactttattgtaaaagagccaatggtgattggtcatgagtctgctggaataattgaggaggttggcagtgaagtgaaacatctggttcctggtgaccgcgtagctttggagcctggaatatcgtgttggccgttgtgaccaatgt

SEQ ID NO: 339 - DNA, 417 bp, Pinus radiata
aaaaaaatggggaagggagcaatgtctcagggtaacgaaaatggggaaggtgacaatatggctgcatggctcactggaataaacactcttcgcatccagcccttcaaacttccgcctcttggcccccatgatgcgaaggtgcgcatgaaggctgtgggtatctgtggcagtgacgtccactatttgaggacattacggtgtgcggactttattgtaaaagagccaatggtgattggtcatgagtctgctggaataattgaggaggttggcagtgaagtgaaacatctggttcctggtgaccgcgtagctttggagcctggaatatcgtgttggcgttgtgaccaatgtaagcgaggctcctacaatttgtgtcccgagatgaagttttttgcaacacctcccgtgcatggttccttg

SEQ ID NO: 340 - DNA, 343 bp, Pinus radiata
ccaaagggaaaaaaatggggaagggagcaatgtctcagggtaacgaaaatggggaaggtgacaatatggctgcatggctcactggaataaacactcttcgcatccagcccttcaaacttccgcctcttggcccccatgatgcgaaggtgcgcatgaaggctgtgggtatctgtggcagtgacgtccactatttgaggacattacggtgtgcggactttattgtaaaagagccaatggtgattggtcatgagtctgctggaataattgaggaggttggcagtgaagtgaaacatctggttcctggtgaccgcgtagctttggagcctggaatatcgtgttggcg

SEQ ID NO: 341 - DNA, 590 bp, Pinus radiata
attggtcatgagtctgctggaataattgaggaggttggcagtgaagtgaaacatctggttcctggtgaccgcgtagctttggagcctggaatatcgtgttggcgttgtgaccaatgtaagcgaggctcctacaatttgtgtcccgagatgaagttttttgcaacacctcccgtgcatggttccttggccaatcagattgttcatcctgcagatttatgtttcaagttgccagataatgtaagtctcgaggaaggtgccatgtgtgaaccactcagtgttggggttcatgcttgtcgccgtgcttctgtaggccctgagacaaatgtcttggtaatgggggcaggtcctatcggccttgtcaccgtgctgtctgcacgtgcatttggagcttcacgaattattattgctgatgtagatgaagagcgtctgtcaatggctaaaaaggttggctccgatgaatgcgtcttagtctccagagactctcaggatattgatgaagaagtgacccgcatacaaaatgccatgggtggaaacatagatgtaacttttgattgtgctggttttgctaaaaccatgtcgacggctctaaa

SEQ ID NO: 342 - DNA, 372 bp, Pinus radiata
atctaaccaaagggaaaaaaatggggaagggagcaatgtctcagggtaacgaaaatggggaaggtgacaatatggctgcatggctcactggaataaacactcttcgcatccagcccttcaaacttccgcctcttggcccccatgatgcgaaggtgcgcatgaaggctgtgggtatctgtggcagtgacgtccactatttgaggacattacggtgtgcggactttattgtaaaagagccaatggtgattggtcatgagtctgctggaataattgaggaggttggcagtgaagtgaaacatctggttcctggtgaccgcgtagctttggagcctggaatatcgtgttggcgttgtgaccaatgtaagcgaggct

SEQ ID NO: 343 - DNA, 378 bp, Pinus radiata
gtggcagtgacgtccactatttgaggacattacggtgtgcggactttattgtaaaagagccaatggtgattggtcatgagtctgctggaataattgaggaggttggcagtgaagtgaaacatctggttcctggtgaccgcgtagctttggagcctggaatatcgtgttggcgttgtgaccaatgtaagcgaggctcctacaatttgtgtcccgagatgaagttttttgcaacacctcccgtgcatggttccttggccaatcagattgttcatcctgcagatttatgtttcaagttgccagataatgtaagtctcgaggaaggtgccatgtgtgaaccactcagtgttggggttcatgcttgtcgcccgtgcttctgta

SEQ ID NO: 344 - DNA, 510 bp, Pinus radiata
agcaatgtctcagggtaacgaaaatggggaaggtgacaatatggctgcatggctcactggaataaacactcttcgcatccagcccttcaaacttccgcctcttggcccccatgatgcgaaggtgcgcatgaaggctgtgggtatctgtggcagtgacgtccactatttgaggacattacggtgtgcggactttattgtaaaagagccaatggtgattggtcatgagtctgctggaataattgaggaagttggcagtgaagtgaaacatctggttcctggtgaccgcgtagctttggagcctggaatatcgtgttggcgttgtgaccaatgtaagcgaggctcctacaatttgtgtcccgagatgaagttttttgcaacacctcccgtgcatggttccttggccaatcagattgttcatcctgcagatttatgtttcaagttgccagataatgtaagtctcgaggaaggtgccatgtgtgaaccactcagtgttggggttcatgcttgtcg

SEQ ID NO: 345 - DNA, 504 bp, Pinus radiata
gtctcagggtaacgaaaatggggaaggtgacaatatggctgcatggctcactggaataaacactcttcgcatccagcccttcaaacttccgcctcttggcccccatgatgcgaaggtgcgcatgaaggctgtgggtatctgtggcagtgacgtccactatttgaggacattacggtgtgcggactttattgtaaaagagccaatggtgattggtcatgagtctgctggaataattgaggaggttggcagtgaagtgaaacatctggttcctggtgaccgcgtagctttggagcctggaatatcgtgttggcgttgtgaccaatgtaagcgaggctcctacaatttgtgtcccgagatgaagttttttgcaacacctcccgtgcatggttccttggccaatcagattgttcatcctgcagatttatgtttcaagttgccagataatgtaagtctcgaggaaggtgccatgtgtgaaccactcagtgttggggttcatgcttgtcg

SEQ ID NO: 346 - DNA, 426 bp, Pinus radiata
gcaatgtctcagggtaacgaaaatggggaaggtgacaatatggctgcatggctcactggaataaacactcttcgcatccagcccttcaaacttccgcctcttggcccccatgatgcgaaggtgcgcatgaaggctgtgggtatctgtggcagtgacgtccactatttgaggacattacggtgtgcggactttattgtaaaagagccaatggtgattggtcatgagtctgctggaataattgaggaggttggcagtgaagtgaaacatctggttcctggtgaccgcgtagctttggagcctggaatatcgtgttggcgttgtgaccaatgtaagcgaggctcctacaatttgtgtcccgagatgaagttttttgcaacacctcccgtgcatggttccttggccaatcagattgttcatcctgcagat

SEQ ID NO: 347 - DNA, 534 bp, Pinus radiata
atttgtgtcccgagatgaagttttttgcaacacctcccgtgcatggttccttggccaatcagattgttcatcctgcagatttatgtttcaagttgccagataatgtaagtctcgaggaaggtgccatgtgtgaaccactcagtgttggggttcatgcttgtcgccgtgcttctgtaggccctgagacaaatgtcttggtaatgggggcaggtcctatcggccttgtcaccgtgctgtctgcacgtgcatttggagcttcacgaattattattgctgatgtagatgaagagcgtctgtcaatggctaaaaaggttggctccgatgaatgcgtcttagtctccagagactctcaggatattgatgaagaagtgacccgcatacaaaatgccatgggtggaaacatagatgtaacttttgattgtgctggttttgctaaaaccatgtcgacggctctaaagctacgtctgctgcggtaaggtatgccttgtgggaatgggccataatgagatgactgtgccactcactccagctgct

SEQ ID NO: 348 - DNA, 352 bp, Pinus radiata
gggaagggagcaatgtctcagggtaacgaaaatggggaaggtgacaatatggctgcatggctcactggaataaacactcttcgcatccagcccttcaaacttccgcctcttggcccccatgatgcgaaggtgcgcatgaaggctgtgggtatctgtggcagtgacgtccactatttgaggacattacggtgtgcggactttattgtaaaagagccaatggtgattggtcatgagtctgctggaataattgaggaggttggcagtgaagtgaaacatctggttcctggtgaccgcgtagctttggagcctggaatatcgtgttggcgttgtgaccaatgtaagcgaggctcct

SEQ ID NO: 349 - DNA, 340 bp, Pinus radiata
gtctcagggtaacgaaaatggggaaggtgacaatatggctgcatggctcactggaataaacactcttcgcatccagcccttcaaacttccgcctcttggcccccatgatgcgaaggtgcgcatgaaggctgtgggtatctgtggcagtgacgtccactatttgaggacattacggtgtgcggactttattgtaaaagagccaatggtgattggtcatgagtctgctggaataattgaggaggttggcagtgaagtgaaacatctggttcctggtgaccgcgtagctttggagcctggaatatcgtgttggcgttgtgaccaatgtaagcgaggctcctac

SEQ ID NO: 350 - DNA, 337 bp, Pinus radiata
gcaatgtctcagggtaacgaaaatggggaaggtgacaatatggctgcatggctcactggaataaacactcttcgcatccagcccttcaaacttccgcctcttggcccccatgatgcgaaggtgcgcatgaaggctgtgggtatctgtggcagtgacgtccactatttgaggacattacggtgtgcggactttattgtaaaagagccaatggtgattggtcatgagtctgctggaataattgaggaggttggcagtgaagtgaaacatctggttcctggtgaccgcgtagctttggagcctggaatatcgtgttggcgttgtgaccaatgtaagcgag

SEQ ID NO: 351 - DNA, 500 bp, Pinus radiata
tctcagggtaacgaaaatggggaaggtgacaatatggctgcatggctcactggaataaacactcttcgcatccagcccttcaaacttccgcctcttggcccccatgatgcgaaggtgcgcatgaaggctgtgggtatctgtggcagtgacgtccactatttgaggacattacggtgtgcggactttattgtaaaagagccaatggtgattggtcatgagtctgctggaataattgaggaggttggcagtgaagtgaaacatctggttcctggtgaccgcgtagctttggagcctggaatatcgtgttggcgttgtgaccaatgtaagcgaggctcctacaatttgtgtcccgagatgaagttttttgcaacacctcccgtgcatggttccttggccaatcagattgttcatcctgcagatttatgtttcaagttgccagataatgtaagtctcgaggaaggtgccatgtgtgaaccactcagtgttggggttcatgcttg

SEQ ID NO: 352 - DNA, 589 bp, Pinus radiata
gtctcagggtaacgaaaatggggaaggtgacaatatggctgcatggctcactggaataaacactcttcgcatccagcccttcaaacttccgcctcttggcccccatgatgcgaaggtgcgcatgaaggctgtgggtatctgtggcagtgacgtccactatttgaggacattacggtgtgcggactttattgtaaaagagccaatggtgattggtcatgagtctgctggaataattgaggaggttggcagtgaagtgaaacatctggttcctggtgaccgcgtagctttggagcctggaatatcgtgttggcgttgtgaccaatgtaagcgaggctcctacaatttgtgtcccgagatgaagttttttgcaacacctcccgtgcatggttccttggccaatcagattgttcatcctgcagatttatgtttcaagttgccagataatgtaagtctcgaggaaggtgccatgtgtgaaccactcagtgttggggttcatgcttgtcgccgtgcttctgtaggccctgagacaaatgtcttggtaatgggggcaggtcctatcggccttgtcaccgtgctgtctgcacgtgca

SEQ ID NO: 353 - DNA, 332 bp, Pinus radiata
gacaatatggctgcatggctcactggaataaacactcttcgcatccagcccttcaaacttccgcctcttggcccccatgatgcgaaggtgcgcatgaaggctgtgggtatctgtggcagtgacgtccactatttgaggacattacggtgtgcggactttattgtaaaagagccaatggtgattggtcatgagtctgctggaataattgaggaggttggcagtgaagtgaaacatctggttcctggtgaccgcgtagctttggagcctggaatatcgtgttggcgttgtgaccaatgtaagcgaggctcctacaatttgtgtcccgagatgaa

SEQ ID NO: 354 - DNA, 312 bp, Pinus radiata
gctcactggaataaacactcttcgcatccagcccttcaaacttcccctcttggcccccatgatgcgaaggtgcgcatgaaggctgtgggtatctgtggcagtgacgtccactatttgaggacattacggtgtgcggactttattgtaaaagagccaatggtgattggtcatgagtctgctggaataattgaggaggttggcagtgaagtgaaacatctggttcctggtgaccgcgtagctttggagcctggaatatcgtgttggcgttgtgaccaatgtaagcgaggctcctacaatttgtgtcccgagatg

SEQ ID NO: 355 - DNA, 432 bp, Pinus radiata
cttcccccggcttccaaggtagtgcagctgatcaagagccaaggcatcaacaagttgaagctctacgacgcagaccctgcagctctccatgcattcagtggtaccgacattaaaatcaccattgcccttcccaatgaggaactctcgaacgttgctcgtcgtctttcgcgagcctatgcctgggtccaaaagaacgtggttgcctacgttccgggcacccagattacggccatagctgtcggcaatgaagtcttcgccgcttctaatgacctcacctcctaccttgtccctgccatgaagaatattcacatggctctcgtcaaatacaacctcgacggaattatcaaggtgtcgagcccccttgccaccagtgtgctccagaactctttcccgccataaccggctttcaagagcgaccttgtggaaccacga

SEQ ID NO: 356 - DNA, 384 bp, Pinus radiata
taaggccactgaatgggtaaatgaaaacattcgggcctacttaccagccacaaagatcacaggcatagctgtagggaacgaggtttacacaggaactgacacgcagttaatggcaaacctggttcccgcaatgaaaaacatccattcggcccttgtcagcatcggtgcagacatgaatattaaagttaccactccccattctcttgctgtacttgggaattcatttccaccgtctgctggttcctttgcatcaaacgtgaagagcctaatgaaaccacttttggatttgttgtctcagattggttctcctttcttcataaatgcttatccatattttgcatacaagggtgaccccagccagatatccctggcttatgtactatt

SEQ ID NO: 357 - DNA, 420 bp, Pinus radiata
  misc_feature (1)...(420): n = A,T,C or G
gaccaatctaggctcttcctgattggatgtgtggccatcttctgttgttcagttctcgcagatggtgataaaataggagtggactatggcatggacgcaagccatcttccatctgcagacgaggtggtaactttgatgaagtccaacaacattgggaaaactagaatttaccaggaaaacgatgttgtactgcaagctttcgcgaattctggtatcgatgtaatagtgggtgtcgctaacgaagaactgaagaacatatcttccagccaagactncgcaaaccgttgggttagcgagcacattgtgcccttctatcccgccaccaatgtcaaatacattgctgtgggaaacgaggttttgataggcgatgccaacaacgtaccctatcttgttccggccatgaacaacattcaaactgcg

SEQ ID NO: 358 - DNA, 399 bp, Pinus radiata
ggactacgctctgtttaggtcaacctctaccgtggtgcaggacgagggtcgcagctacatcaacttattcgatgccctcgtcgatacccttctttctgccatggaggacttggggtatcgcaacatcccactcatcgttactgaaagcggatggccttctggtggcaatgatgtggccacggttgacaacgctcgcgtttataacaacaatctcatccgccatgtgctctcaaatgtagggactcccaagaggccgggaacgagcattgagacctacatcttcgcacttttcaacgagaacagaaaagctggtgatgagacggagcgtcactttgggcttttctaccttaaccaacaatctgtatactctctaaactttactccgtaactgcgtcgcag

SEQ ID NO: 359 - DNA, 469 bp, Pinus radiata
ggactacgctctgtttaggtcaacctctaccgtggtgcaggacgagggtcgcagctacatcaacttattcgatgccctcgtcgatacccttctttctgccatggaggacttggggtatcgcaacatcccactcatcgttactgaaagcggatggccttctggtggcaatgatgtggccacggttgacaacgctcgcgtttataacaacaatctcatccgccatgtgctctcaaatgtagggactcccaagaggccgggaacgagcattgagacctacatcttcgcacttttcaacgagaacagaaaagctggtgatgagacggagcgtcactttgggcttttctaccttaaccaacaatctgtatactctctaaactttactccgtaactgcgtcgcagtccgacgaacgaatagagccaatatgaatatgtcctctatatgtcaactgcctcgatagatatattatgt

SEQ ID NO: 360 - DNA, 473 bp, Pinus radiata
gccatgcgaagaagacagctgggctgctgtctcaaatctgcgatcggattgctactgtaactgttgtctgaccattttaatgtacgttatggcttcgttccaacgccagccttgtacattgcaggcctttgcattctgcattattgttctttgctctttctatgcagacgctggaacagtagggatttgctatggacgggtggctgacaatttggcggcaccggccgatgtggtaggcctgctgaaagacaacaacatcagcaaagtgcggctcttcgactcagaccctgcggtgcttcaggccttcgctgggtcggagatcggactcatgacagctgtccccaacgagttgttggagagcatcggtagcaacccggaggctgccgcagggtgggtgcagggaaacgttgtgcccttccacccggcgacccggatcgaatacatcgcggtgggcaacgaggttttgcacagca

SEQ ID NO: 361 - DNA, 441 bp, Pinus radiata
  misc_feature (1)...(441): n = A,T,C or G
gtcgccnccccggtgctgcaaccgttgctcgatttcgcgaaccggacgggctctttcctcttcctggacatctacccgttcttcgcctggagcgcgaaccccgccaacgtgtctctggactacgctacgttgagcctggaccgcaacacggcggaattccaagacgccgggctcagctactccaacatgctggacgcccagctggacgccgtgctggcagccatggaccggctcggattccccagcgttaatgtggtcattggcgagacagggtggcccacaaaaggcgacgacaatcagccgggcaccaatgtcccgaacgccacgctgtacaaccagcagctcgtacaaaaggccctcgccgacccgccacgggggacaccccggcgccccggngccttcatccccacctatattttctccctctttaacgaggaccag

SEQ ID NO: 362 - DNA, 351 bp, Pinus radiata
cgccgtctaaaggagtcttcgtagatgctgtgaaggacacgatgggccaaatactcaaatttctgtcacagaacggcggtcccttcatggcggatgtctatccatacttcagctacatcggcaacccaagcaacattcatttggactacgctctctttcagcccacggctacgccggtgacagacaaagatcacagctacagcaacctgttcgatgccatggttgatactcttttgtcggccatggaagcctcggggtatcccaacatcccgatcgtcattaccgaaagtggatggccttctgctggcgcggaagtggccaccattgagaatgctcagacctataacaata

SEQ ID NO: 363 - DNA, 388 bp, Pinus radiata
cgtgattgggttgattgccgtcttctgttgtgcaatcgtcactgatggtgataaaataggagtgaactacgggatgcaaggagacaacctgccacctgcagaccaggtggtaactttgctgaacggccacaacatcgggaaaatgaagcttttcaatccagacggtggtgcattgaatgcttttgcaaattctgggatcgatgtaatcgtaggagtcagtaacaacgatttgcaggccatctcctccagccaggactcagcaaatggttgggttaatgacaatattgtgcgctattccagcaccagtatcaaatatattgcggtgggcaacgaggttttgcctagcacgcagtaccgtatcgtatcttgttccagccatgaacaacat

SEQ ID NO: 364 - DNA, 560 bp, Pinus radiata
gtgggctctggttttgctgtctggactggctctttcaaatgctctgtccagcacaagtgccaccacaacaggaatcaactatggacaagttgcagacgacttgccaccaccggaactagtagtgggtcttttgcagaccagcaatatcggcagaataaaactctacactgtaaatgcgacagtcctgaaagcatttgcaaacactggtatagaattgattgttggagtggcaaatgatatcattggcaacttgacagattcaaactcagccactgaatgggtcaatgaaaacattcaaacttacttaccagccacaaagatcataggtatagcagtagggaacgaggtttacacaggaactgcacacaagttaatggcaaacctagttcctgcaatgcaaaacattcattcggccctagtcagcattggtgcggacacggatattataattagcactccccattctcttggtgtacttgcgacttcatatccaccatctgctggttcatttcaaccaggactggagagcctactggaacagcttttggctctcctgtctc

SEQ ID NO: 365 - DNA, 494 bp, Pinus radiata
ggagtttggcgcagcgtttaccagccctaggcgttgactatggacaaactgcagacaatcttcctccaccatctgcagtagcaaagctggttcagagtacaagtatttcaaagttgagactatatggagcagatcctgcaattcttcaagcatttgctaacacaggaattgggttagttgtaggcattggtaacgatcaaatcccatctctgaaccagctggctgttgcacagaattggattaagaacaatatcgttccttttgttcctgccactgatatcattggaatctcggtggggaacgaggttctgttcagtggggatgggagtctgatttcccagctcctccctgcattgcagaacctacacactgcccttgttgaggtttcacttgaccagcaaattaaggtctccacacctcattctctggccatactttctacatctgtccccccatctgctggccgtttcaatgaaagttttgacatgaaatcc

SEQ ID NO: 366 - DNA, 365 bp, Eucalyptus grandis
acgaattggaatgataatgacccgtccatcttcgatataaacattgttggtggcttacaaggcgaataccagataacaaatggctatggccccagtactgccccacaactcttacgggatcattggaataattacattaccgagcaggacttccgatttatggcgaccaataatgtaactgccgtgaggattccggtaggatggtggattgcatatgatccaacaccgccgaagccttttgtgggaggctcgctgtatgcactggacatggcttttacatgggcagagaattatcgtatgaaggtaatagttgatctccatgctgctccagggtcgcaaaatgccgaatcttatagtgcgacgag

SEQ ID NO: 367 - DNA, 435 bp, Pinus radiata
  misc_feature (1)...(435): n = A,T,C or G
cagcggcgggccttaatcatgttcgtatccccatcgggtattgggcttacgatgtttcgggcggagaaccgttccatcaaggacaggctgattatttggttaaggctattggatgggcacagaagcacaatatcaaggttatcgtcgacctgcatggtgtcccaggcagtcagaacggttttgacaattccggcctcctaacatcgacaccctcatgggacacaaacagcacaaatattgcccgaggcagcaacatcatcaagaaattagccgcccaatttgccatgcagaccaacgtcgtgactgcaattgctcctctaaatgagccagcaggatatcttagcccacgtctcctcgatactgcgaacaacattggctcgnagttatgggagtatccgcactccatttggcaattcaacgcaaagccacatgctt

SEQ ID NO: 368 - DNA, 630 bp, Pinus radiata
ctttcatcacagaggagatttcgttttcatgtccaagaacgggataagtgctgtcagaattccagttggatggtggattgctagtgatccatatcctcctgctccttttgttggaggatctctagcttgtctcgacaaagctttctcgtgggcacagaaccatgacattaaggtgattatcgatctccatgctgctccgggctcacaaaacggtgatgagcacagtggcaccagagatggatttatagaatggcctgagtcgcaagagaacatcgacaagagtctatctgtcattgattttcttgctgcgagatatgctgcacaccctgcccttttgggcattgaactattgaatgaaccacggtctcctgcagtaagtttgaacaatgtgactgattactattcacggggttacgacatagttcgaaagtattcgtcgtcggcgtatgtgataatgtgcaacagaatcggccctgctgatcccaaggagttgtttcaaatgaacaacggcttatcccgcacagttgtggatgtgcattattacaatctctacgatgacgccactttcaaaaatatgacggttcagcagaacatcgactacatcaaaaccacaagagctcaaactctgca

SEQ ID NO: 369 - DNA, 507 bp, Pinus radiata
aacggccttggacctgacaaagctcctcaagtcatgaatgatcactggaacagcttcattacggagagtgactttgcattcatgtccagtaatggtataaatgctgtgagaattccagttggatggtggattgccagtgaccccaatcctcctgctccgtttgtaggaggatctctgaaagctctggataacgcattcacatgggctaagaatcataacataggggtaattgtggatctccatgctgctccgggttcccaaaacggagatgcacacagcggcacgagagatggatatcttgagtggcctgattcacaagacaacatcgataaaagtatatcagtaatcgactttctcgctggcaggtatgcttcaaactcagctctcctgggaattgagttgctgaatgaaccccgagcacccggtgtaccggtgaacacattgaaaacatattataaaaggggttatgacaccgttcgaaagcattcgtcctctgcctatgtgata

SEQ ID NO: 370 - DNA, 480 bp, Pinus radiata
caatagtgtgcatatcaaagtcttcaatggaatgtacatgcaggcacaatctaaagatcagctgactgccgatttcgaaggggagcctggttgggacgacaataatgctgcaactttcgagatgaccatcgtaaggacgttgcagggggagtttcaaatctcaaacggttatggacccgagaaagctacacaagtcttgaacgaacatcgaagcactttcatcacagaggatgatttcgttttcatgtccaagaacgggataagtgctgtcagaattccagttggatggtggattgctagtgatccatatcctcctgctccttttgttggaggatctctagcttgtctcgacaaagctttctcgtgggcacagaaccatgacattaaggtgattatcgatctccatgctgctccgggctcacaaaacggtgatgagcacagtggcaccagagatggatttatagaatggcctgagtcgca

SEQ ID NO: 371 - DNA, 366 bp, Pinus radiata
gatcaattgactgccgacttccaaggtaagcctggatggaatgatggcaatgccgcaacattcgagatgaacgttgtaactggagataatggcataggaggggagtaccagctaacaaacggccttggacctgacaaagctcctcaagtcatgaatgatcactggaacagcttcattacggagagtgactttgcattcatgtccagtaatggtataaatgctgtgagaattccagttggatggtggattgccagtgaccccaatcctcctgctccgtttgtaggaggatctctgaaagctctggataacgcattcacatgggctaagaatcataacataggggtaattgtggatctccatgctgct

SEQ ID NO: 372 - DNA, 427 bp, Pinus radiata
  misc_feature (1)...(427): n = A,T,C or G
ggaatgcgccggtaataaagaactgtgcggtcgcaacggtacgttgcagactattggcataggcataaacggtgtacggcggcgggcattcccccgatttcaccatcccctgctctgccagccattcacgcatgtaatggcccatatacacttcgagcacgccacctttggtggtgagttgcccaccggggacgtcccattctggccatttattcggcgtcgactgctccagcacactggccattgttcgccagcggngcacgtaagttatggcggctcatcatgagcacttgctgtagctgatagccttccggtacgnttgtgcctgagcggtttgaagcgagttaaactatccctgccacagctgcgggattagcgttttgttcaatcctggcacctcttttggttatcaatcactaagagtgtg

SEQ ID NO: 373 - DNA, 384 bp, Eucalyptus grandis
  misc_feature (1)...(384): n = A,T,C or G
atgaatattatctgcacgttatgaatattatcgcggttccagnggggcaaaaagaatcgattctttttgcccctctgaatactatctgcacgttatgaatattttggaactgatggtcgtggtggatattttgatgaatacgggatcatccgtgatattattcaaaaccatcntttgcaggttttctgtctggttgccatggaaaancccgtatctctcaaaccagagcacaattcgcgatgagaaagtgaaggtccttcaatcagtacttccgattacagatgaagaggttgttcttggacaatatgaagnttnagggncgatccaatgtccctgacaattcaaatactcccacttttgcaactatggttctacgtatacata

SEQ ID NO: 374 - DNA, 368 bp, Eucalyptus grandis
ggcagggaaagctctaaactcaagaaaagcagagatacgtgtccaatttaaggatgttcctggggatatattcaaatgtaagaagcaagggagaaatgagttcgtaattcgcctacaaccttctgaagccatgtacatgaaactcacggtcaagcagcctgggttggatatgtcaaccgtgcagagtgaacttgatttgtcatatcggcaacgttatcaaggagtcgtaattcctgaggcatatgagcgtcttatacttgacacgtacatttctttcctctttatttagagtacttccaacttaaaaaaatctcgtagctctttgtttggagcttagctcagtggagtagacttgcattcaggcgggc

SEQ ID NO: 375 - DNA, 161 bp, Eucalyptus grandis
ggcagggaaagctctaaactcaagaaaagcagagatacgtgtccaatttaaggatgttcctggggatatattcaaatgtaagaagcaagggagaaatgagttcgtaattcgcctacaaccttctgaagccatgtacatgaaactcacggtcaagcagcctg

SEQ ID NO: 376 - DNA, 283 bp, Eucalyptus grandis
  misc_feature (1)...(283): n = A,T,C or G
gtgcagatagtattcagagaagattttggaactgatggtcgtggtggatatttggatgaatacgggatcatccgtgatattattcaaaaccatcttttgcaggttttctgtctggttgccatggaaaaacctgtatctctcaaaccagagcacattcgcgatgagaaagngaaggtccttcaatcantacttccgattacagatgaagaggttgttcttggacaatatgaaggttacagggacgatccaactgtccctgacaattcaaatactcccacttttg

SEQ ID NO: 377 - DNA, 363 bp, Eucalyptus grandis
cacggtcaagcagcctgggttggatatgtcaaccgtgcagagtgaacttgatttgtcatatcggcaacgttatcaaggagtcgtaattcctgaggcatatgagcgtcttatacttgacacaatcaggggcgaccaacagcactttgttcggagagatgaacttaaggcggcttgggagatttttacaccgatgcttcacagaattgacgatggtgaatttaagccaattccataccaaccagggagccgaggtcctgttgaagcggacgagctgctggaaaaagctggttacgttcaaacgcatggttacatttggatccctccaaccttgtagatatgaagacaccgccacaaataaatttc

SEQ ID NO: 378 - DNA, 457 bp, Pinus radiata
gtcgcttaaagatgttgtggcagtcaggtattggtggcagctttctgggtccactttttgtgcacagtgctcttcaaacagatcctgaggcagctcaatgtgcaaatgggcgtcaactgcgatttctagcaaatgttgatccagttgatgtcgctcggagtattgatgggttaaacccggaaactacattagttgttgtggtatcaaagacattcacaacagcagaaaccatgctaaatgctcgaacattaaggacatggatcacatctgcccttggttctgaagctgttgcaaagcacatggtggcagttagtactaaccttaagcttgtaaaagaatttggaatagacccacaaaatgcttttgcattctgggattgggttggcggtcgctacagcgtgtgcagtgctgtgggtgccctccccttatcacttcagtatgggtttcctattgttag

SEQ ID NO: 379 - DNA, 386 bp, Pinus radiata
  misc_feature (1)...(386): n = A,T,C or G
gtcgctcggagtattgatgggttaaacccggnaactacattagttgttgtggtatcaaagacattcacaacagcagaaaccatgctaaatgctcgaacattaaggacatggatcacatctgcccttggttctgaagctgttgcaaagcacatggtggcagttagtactaaccttaagcttgtaaaagaatttggaatagacccacaaaatgcttttgcattctgggattgggttggcggtcgctacagcgtgtgcagtgctgtgggtgccctccccttatcacttcagtatgggtttcctattgttagcaagtttctggagggagcaagaagtatagataaccatttccacacaactccatttgagaaaaatattcctgttttgct

SEQ ID NO: 380 - DNA, 365 bp, Pinus radiata
tgcagtgctgtgggtgccctccccttatcacttcaatatgggtttcctattgttagcaagtttctggagggagcaagaagtatagataaccatttccacacaactccatttgagaaaaatattcctgttttgcttggtctcctcagtgtgtggaatgtttcctttcttgggtatccagctagggctatcttgccatacactcaggctctggagaagtttgcaccgcacatccagcagcttagcatggagagtaatgggaagggagtttctattgatggtgtgcccctcaattttgaggctggtgaaatagattttggagaacctggtacaaatggccagcatagcttttaccagttaattcatca

SEQ ID NO: 381 - DNA, 491 bp, Pinus radiata
tgcagtgctgtgggtgccctccccttatcacttcaatatgggtttcctattgttagcaagtttctggagggagcaagaagtatagataaccatttccacacaactccatttgagaaaaatattcctgttttgcttggtctcctcagtgtgtggaatgtttcctttcttgggtatccagctagggctatcttgccatacactcaggctctggagaagtttgcaccgcacatccagcagcttagcatggagagtaatgggaagggagtttctattgatggtgtgcccctcaattttgaggctggtgaaatagattttggagaacctggtacaaatggccagcatagcttttaccagttaattcatcagggtcgtgtaattccttgtgattttattggcatcgtcaagagccagcagcccatttatttacaaggggaagttgtgagtaaccacgatgagcttatgtctaacttttttgcacagccggatgctct

SEQ ID NO: 382 - DNA, 446 bp, Eucalyptus grandis
tatgcgcagaggcaaaatcaatgttcggtatctcagaattcctaatgaaatcagatccaagtagtgaaaagtactctccagggttcacggttggctttttcggactattgggaccataaaatccctcaaggcccacagtcagcagatggttcttgtcaattgattttacatatgctgacatttccacaatccaatcctgaagagtatcacccgaattatctgtcatgcaacgtggctcatttattaactcccatccaaaaatggtgggatcattcctatattcaacgccagtaatggtgttcttccttgttaggataaccttgacataatctttgaagtactgccgaatagaaggatcgtagaaaaacgaatcatttgacgagcttaaaccaatgccttcttcccacgcccacttgacgtactgagtcttgccaccatatgcttcc

SEQ ID NO: 383 - DNA, 464 bp, Eucalyptus grandis
  misc_feature (1)...(464): n = A,T,C or G
tatgcgcagaggcaaaatcaatgttcggtatctcagaattcctaatgaaatcagatccaagtagtgaaaagtactctccagggttcacggttggctttttcggactattgggaccataaaatccctcaaggcccacagtcagcagatggttcttgtcaattgattttacatatgctgacatttccacaatccaatcctgaagagtatcacccgaattatctgtcatgcaacgtggctcatttattaactcccatccaaaaatggngggatcattcctatattcaacgccagtaatggtgttcttccttgttaggataaccttgacataatctttgaagtactgccgaatagaaggatcgtagaaaaacgaatcatttgacgagcttaaaccaatgccttcttcccacgcccacttgacgtactgagtcttgccaccatatgcttccaagttattaactaagcta

SEQ ID NO: 384 - DNA, 385 bp, Eucalyptus grandis
  misc_feature (1)...(385): n = A,T,C or G
tatgcgcagaggcaaaatcaatgttcggtatctcagaattcctaatgaaatcagatccaagtagtgaaaagtactctccagggttcacggttggctttttcggactattgggaccataaaatccctcaaggcccacagtcagcagatggttcttgtcaattgattttacatatgctgacatttccacaatccaatcctgaagagtatcacccgaattatctgtcatgcaacgtggctcatttattaactcccatccaaaaatggtgggatcattcctatattcaacgccagtaatggtgttcttccttgntaggataaccttgacataatctttgaagtactgccgaatagaaggatcgtagaaaaacgaatcatttgacgagct

SEQ ID NO: 385 - DNA, 433 bp, Eucalyptus grandis
tatgcgcagaggcaaaatcaatgttcggtatctcagaattcctaatgaaatcagatccaagtagtgaaaagtactctccagggttcacggttggctttttcggactattgggaccataaaatccctcaaggcccacagtcagcagatggttcttgtcaattgattttacatatgctgacatttccacaatccaatcctgaagagtatcacccgaattatctgtcatgcaacgtggctcatttattaactcccatccaaaaatggtgggatcattcctatattcaacgccagtaatggtgttcttccttgttaggataaccttgacataatctttgaagtactgccgaatagaagggatcgtagaaaaacgaatcatttgacgagcttaaaccaatgccttcttcccacgcccacttggacgtactgagtcttg

SEQ ID NO: 386 - DNA, 349 bp, Pinus radiata
  misc_feature (1)...(349): n = A,T,C or G
gggtttgtcactactagcggcaccgagtttgagttggacggnaagccatttgcgtttgttggcgcaaattcatattggctcccacttctgacggatcctgatnacgtcgagtcgacgttccagcagatggaggacgctggtatcaaggttcttcgtacttggggcttcaatgctattaatgcgactgaattaccgacggcgctcgccaccaaccttacctactaccaggtctgggatgagggcaccttcactctcaatgaaggtccgcagggtcttcagcgcctcgatgcagtcgtcgcggcagcggagcgacacaatatcaagatgatcatcgcgttcacgaacaact

SEQ ID NO: 387 - DNA, 438 bp, Pinus radiata
  misc_feature (1)...(438): n = A,T,C or G
ctggccctcgtagaatcctgggtccttggatgatttcccaaactctgcaaacagaactggtttcttcagtattttgtttgcatcttccaaatgggttgatatccaatcatgtagaaatgaaatctgggcatcctcatttgatcctgccaaccagatatcagggtaggaatgaacagttgcaaaatcaattcctgtgatttggttattggtgatgaaatttgtccccacagagaagccgggattgttccctttgttggactctccataaaacccttccaagccaacctcgaggagatgacttccatcgatggatttgacatgactagccatttcctctatccatccctgtatggtagcccccgaaggatcactttgacaacgaggctcgttcatcaactcccatgcaaagattgtagggtcatccttgnaggctactct

SEQ ID NO: 388 - DNA, 414 bp, Pinus radiata
ggggtttgtcactactagcggcaccgagtttgagttggacgggaagccatttgcgtttgttggcgcaaattcatattggctcccacttctgacggatcctgatgacgtcgagtcgacgttccagcagatggaggacgctggtatcaaggttcttcgtacttggggcttcaatgctattaatgcgactgaattaccgacggcgctcgccaccaaccttacctactaccaggtctgggatgagggcaccttcactctcaatgaaggtccgcagggtcttcagcgcctcgatgcagtcgtcgcggcagcggagcgacacaatatcaagatgatcatcgcgttcacgaacaactgggtgggatacggaggattggatctctatgttcgctggatcattcctgggagtacgcacgacga

SEQ ID NO: 389 - DNA, 625 bp, Pinus radiata
  misc_feature (1)...(625): n = A,T,C or G
gttgactagagtgaacagcattactggagtagcctacaaggatgaccctacaatctttgcatgggagctcatgaacgagcctcgttgtcaaagtgatccttctgggaggaccatccagggatggatagaggagatggctagccaggtcaaatccattgatggaaaccatcttctggaggctggtttggaaggtttttatggagaatacaaaaaagagatcaatccaggcttctctgtgggtacagatttcatcaccaataaccaaatcagaggacttgattttgcaacagttcattcctatcctgacatttggcttgctggggcagatgaggagacccagctttcatttttgcagagttggataaagaaccatctgcaagatggaagcaggatattgaaaaaaccagttttgtttgcagagtttgggaaatcttacaaaagcccaggatttcacatgagtgagagagacaatttacttgatatggtttataaacatgtatatgcatctgctaaatggggaggagcaggtggaggggccatgttttggcagctgatggcagaangaatgagctcatatggagatgggtatgagattgttttgtctgagaatccatccacagcagct

SEQ ID NO: 390 - DNA, 78 bp, Eucalyptus grandis
caccaccggcaggtgatccagagacggattttcggcccatgcttcggtcagcgccggacgcagttggttctggctggc

SEQ ID NO: 391 - DNA, 178 bp, Eucalyptus grandis
acccctttcaggcgttggttagcgttcggtgtgcggcggccgttaaaccagtcgagcaccaccggcaggtgatccagagacggatttttggcccatgcttcggtcagcgccggaagcagttgtttctggctggcgttgatttgcgttttcagttccggatgctgggcaggcaagctgt

SEQ ID NO: 392 - DNA, 359 bp, Eucalyptus grandis
  misc_feature (1)...(359): n = A,T,C or G
acccctttcaggcgttggttagcgttcggtgtgcggcggccgttaaaccagtcgagcaccaccggcaggtgatccagagacggatttttggcccatgcttcggtcagcgccggaagcagttgtttctggctggcgttgatttgcgttttcagttccggatgctgggcggcaagctgttccagcggccagccgagtacgcgaccaaaccaggcgtagatatcaccaaacgccgattggcctgcttncagaccgataaatccaggcaccacgctgctggcactacacccaggatgtcggcaaggtggcggaacacgcagaaatctgcggccgctgtgtcagcaacgtcgccggtgacggtg

SEQ ID NO: 393 - DNA, 510 bp, Eucalyptus grandis
acccctttcaggcgttggttagcgttcggtgtgcggcggccgttaaaccagtcgagcaccaccggcaggtgatccagagacggatttttggcccatgcttcggtcagcgccggaagcagttgtttctggctggcgttgatttgcgttttcagttccggatgctgggcggcaagctgttccagcggccagccgagtacgcgaccaaaccaggcgtagatatcaccaaacgccgattggcctgcttccagaccgataaatccaggcaccacgctgctggcactacacccaggatgtcggcaaggtggcggaacacgcagaaatctgcggccgctgtgtcagcaacgtcgccggtgacggtgaaaaacgtaagtttgcctgatgagtcaatcgatctgttcaacagggctacgctggctgtggctggtggtaagtcgtgctgattatcgatctgggcagcaaatacctgatcctccagaactttgctctgggggatacggtcccgctgttccc

SEQ ID NO: 394 - DNA, 469 bp, Pinus radiata
gaggtacgcggttatagcatgacccgtgttcagggtgaagagtttacgttcgacaaatgccatcaggttgtcggttaactccatgcctgggatgttcggcagtgcgcctttgaactgcgttttatcgacaatccattcgctgaaggtttctaccgtcacttccagcggatcgttagttgccgaagccgaaggcggtacgatgcggtcaacggcggaatcgacaaagccaacgtgttcttctacccacgctttggcgtcttccggcagggcgttcatcacatggcctttcagctgcgtggtaccgcgtaccatgttttcacaggcgatgatgttcagcggggattcattaccttgttctttacgtttcacctgccctttggcgattgccggagcaatacgttccagcacaaccgggccaacggcggtagtgactaaatcaacctgagcaatcagatcaacgacatcatca

SEQ ID NO: 395 - DNA, 443 bp, Pinus radiata
aatcgcgtcacgaatggtctgatgaccggccagttttccgaggtacgcggttatagcatgacccgtgttcagggtgaagagtttacgttcgacaaatgccatcaggttgtcggttaactccatgcctgggatgttcggcagtgcgcctttgaactgcgttttatcgacaatccattcgctgaaggtttctaccgtcacttccagcggatcgttagttgccgaagccgaaggcggtacgatgcggtcaacggcggaatcgacaaagccaacgtgttcttctacccacgctttggcgtcttccggcagggcgttcatcacatggcctttcagctgcgtggtaccgcgtaccatgttttcacaggcgatgatgttcagcggggattcattaccttgttctttacgtttcacctgccctttggcgattgccggagcaatacgttcca

SEQ ID NO: 396 - DNA, 252 bp, Pinus radiata
tctcgtcgagaatcgcgtcacgaatggtctgatgaccggccagttttccgaggtacgcggttatagcatgacccgtgttcagggtgaagagtttacgttcgacaaatgccatcaggttgtcggttaactccatgcctgggatgttcggcagtgcgcctttgaactgcgttttatcgacaatccattcgctgaaggtttctaccgtcacttccagcggatcgttagttgccgaagccgaaggcggtacgatgc

SEQ ID NO: 397 - DNA, 395 bp, Pinus radiata
aatcgcgtcacgaatggtctgatgaccggccagttttccgaggtacgcggttatagcatgacccgtgttcagggtgaagagtttacgttcgacaaatgccatcaggttgtcggttaactccatgcctgggatgttcggcagtgcgcctttgaactgcgttttatcgacaatccattcgctgaaggtttctaccgtcacttccagcggatcgttagttgccgaagccgaaggcggtacgatgcggtcaacggcggaatcgacaaagccaacgtgttcttctacccacgctttggcgtcttccggcagggcgttcatcacatggcctttcagctgcgtggtacccgcgtaccatgttttcacaggcgatgatgttcagcggggattcattaccttgt

SEQ ID NO: 398 - DNA, 422 bp, Pinus radiata
  misc_feature (1)...(422): n = A,T,C or G
tctcgtcgagaatcgcgtcacgaatggtctgatgaccggccagttttccgaggtacgcggttatagcatgacccgtgttcagggtgaagagtttacgttcgacaaatgccatcaggttgtcggttaactccatgcctgggatgttcggcagtgcgcctttgaactgngttttatcgacaatccattcgctgaaggtttctaccgtcacttccagcggatcgttagttgccgaagccgaaggcggtacgatgcggtcaacggcggaatcgacaaagccaacgtgttcttctacccacgctttggcgtcttccggcagggcgttcatcacatggcctttcagctgcgtggtacccgcgtaccatgttttcacaggcgatgatgttcagcggggattcattaccttgttctttacgtttcacctg

SEQ ID NO: 399 - DNA, 305 bp, Eucalyptus grandis
  misc_feature (1)...(305): n = A,T,C or G
ccgataagaagctcatccccgncaagtccaagttccagacctacctgggacggncctggaagagttctcgaggaccatcatcatggagtcgtcaatcgaggacttcattgatccggcaggctttatgccatgggagggtgatttcgcgctcaanaccctgtactatgcggagtttaacaacaaggggcccggtgcgaacatcaacgcccgagtgaagtggcccggttacaagaagatcaataagcaggaagcagccaagttcaccgctgggacttttctggatggggattggatcaagggagcct

SEQ ID NO: 400 - DNA, 372 bp, Eucalyptus grandis
  misc_feature (1)...(372): n = A,T,C or G
atcgtctacaacagcaactacgtcgacggcgtcaacaccttcaagaccgccaccgtcgccgtcctcggtgagcagttcctcgccaaggacatcgggttcgagaacgacgcaggcgccatcaagcaccaggccgtggcgctgagggtccagtcggacttctccgtcttctacaactgccacatggacgggtaccaggacaccctctacacccacgcccaccgccagttctaccgcgactgcaccatctcgggcaccatcgacttcatcttcggcgacgcctccgccatcttccagaactgcaagatgctcgtccgcaagccgctggacaaccagcagtgcatcgtcaccgcccagggncggaaggagaggcgc

SEQ ID NO: 401 - DNA, 262 bp, Eucalyptus grandis
gttcttccgggagtgcgacatctacgggactgtcgacttcatcttcgggaacgccgccgtcgtgctccagaactgcagcctctatgcccgcaagcccatgcccatgcagaagaacaccatcacggcccagaaccgcaaggacccgaaccagaacacgggcatctcgattcacgcgtgccggatcctggccacgtcggacctcgccgcctcaaacgggagcttcctctcgtacctcggccggccctggaagttgtactcgagg

SEQ ID NO: 402 - DNA, 403 bp, Eucalyptus grandis
gcccgacgtggttgtggcccaggacggaagcggcaagtacaagaccatccgtgaggctctgaacgaggttcctaagaagaacaacaagaccttcgtcatatacatcaaggaaggagtgtacaaagagaaagtactggtagacaagaagacgaccaatgtcatgattatcggcgacggcccgacgaagactgtgatcaccgggagcttgaactatgtcgatggagtccaaacctgcaacaccgcaacattcactgccataggaagctacttcatagccaaggacatcaagtttgagaactcggcaggcgccgagaagcaccaggccgtggcgctacgcgtccagtccgacatgtccgtaatttacaactgccacatggacgccttccaggacaccctctacgcg

SEQ ID NO: 403 - DNA, 408 bp, Eucalyptus grandis
gcaaggaccccaaccagaacaccggcatttcgatccatgcttgccagatcgtcgccgctccagatctcgaggcatctaaaggaagcatcccgacgtacctcgggcggccatggaagatgtactcgagggttgtgtacatgttgtcctacatgggcgatcacattcaccccgaaggtggctggagtggaacggagactttgcgctagacactttgtattacggagagtacatgaacgatgggcccggggcagccgtcggcctacgtgtgaaatggccgggtttccgagtcatcacatccacaacagaggcaaacaaattcacagtcgcgcagttcatatttggatcttcatggttgccgtccaccggggtggcattcgtggctggactatcaacttgaaagttgaaagt

SEQ ID NO: 404 - DNA, 361 bp, Eucalyptus grandis
gcggcggcgcagtatccagagtggctaggggagagagagagggagctgctggacatgccggcggcggaggtacaggcggacatagtggtggcgaaggacggagcgagcgggacgtacaagacgattgcggaggcgataaagaaggcgccggagagcagtggccggaggatcatcatctacgtgcgagccgggaggtacgaggaggataacttgaaggtggggaagaagaagacgaacctcatgttcatcggcgatgggaagggcagaacggtcataacgggcggcaaaagtgtagccgacaagatgaccacgttccacaccgcctccttcgcgggcgagcggaccggtttcattgcccgca

SEQ ID NO: 405 - DNA, 227 bp, Eucalyptus grandis
ctacaatcatcaccggtgatgatagtgtggctgggggttcttccttgcgcggctctgctacattcacaatcaccggcgatggatttatagcccgagacatcgggttccaaaacacagcggggccccaaggtcaacaggctgtcgccctaaccgtggcctccgatcacgcggcattctataggtgcagcatcgcgggctaccaggacacattgtacgcgctcgtactc

SEQ ID NO: 406 - DNA, 373 bp, Eucalyptus grandis
ttttttttttaatctccaaacattccaaattattgaattcacaacacaacttacagaaactcccccagaaagaaaggaccaatactcatttttcacagcccttcagtgtaagacactccagtggacttcaccaagtccctccctgaatcagctcggccacggtgaacttcttcgcctctgctgggctggtgatgacatgataacctggccacttcacccgcttgctcgttcccgcgcctggtcccttgttcatgtactccccgtagtacagagtcttgagggcatgatcgccgctccacaccgaccaccctgtgggatcaatgtgatcaccaatgtttgattgcatcaccacagtcctagagtacaacttcca

SEQ ID NO: 407 - DNA, 190 bp, Eucalyptus grandis
cccaaccagaacaccggcatttcgatccatgcttgccagatcgtcgccgctccagatctcgaggcatctaaaggaagcatcccgacgtacctcgggcggccatggaagatgtactcgagggttgtgtacatgttgtcctacatgggcgatcacattcaccccgaagggtggctggagtggaacggagact

SEQ ID NO: 408 - DNA, 387 bp, Eucalyptus grandis
cccaaccagaacaccggcatttcgatccatgcttgccagatcgtcgccgctccagatctcgaggcatctaaaggaagcatcccgacgtacctcgggcggccatggaagatgtactcgagggttgtgtacatgttgtcctacatgggcgatcacattcaccccgaagggtggctggagtggaacggagactttgcgctagacactttgtattacggagagtacatgaacgatgggcctggggcagccgtcggcctacgtgtgaaatggcctggtttccgagtcatcacatccacaacagaggcaaacaaattcacagtcgcgcagttcatatttggatcttcatggttgccgtccaccggggtggcattcgtggctggactatcaact

SEQ ID NO: 409 - DNA, 482 bp, Eucalyptus grandis
gccgtcgggcctggggttcgacggcggggtcccttcggggctgacggcggacgcgacggtgtgcaaggacgggggaagcgggtgctacgcgacggtgcaggccgccgtcgacgccgcgccggagaacgtcggcggagggaagaggttcgtgatccacatcaaggaaggggtgtacgaggaaacggtgagggtcccgttcgagaagaagaacgtggtgttcctgggggacggcatgggcaaaaccgtcatcaccgggtcctccaacgcggggcaacctggggtctccacctacaacaccgccaccgtcggagtgctcggcgacggattcatggcaagcgggctcacgatccagaacaccgcaggtccggtcacccaccaggcggtggcgttccggtcggacagcgatttctcggtcatcgagaactgcgagttcttggggaaccaagacacgctctacgcccactccctccggcagtactaca

SEQ ID NO: 410 - DNA, 424 bp, Eucalyptus grandis
cccaaccagaacaccggcatttcgatccatgcttgccagatcgtcgccgctccagatctcgaggcatctaaaggaagcatcccgacgtacctcgggcggccatggaagatgtactcgagggttgtgtacatgttgtcctacatgggcgatcacattcaccccgaagggtggctggagtggaacggagactttgcgctagacactttgtattacggagagtacatgaacgatgggcctggggcagccgtcggcctacgtgtgaaatggcctggtttccgagtcatcacatccacaacagaggcaaacaaattcacagtcgcgcagttcatatttggatcttcatggttgccgtccaccggggtggcattcgtggctggactatcaacttgaaagttgaaagtgacatttacagatacgatatgtt

SEQ ID NO: 411 - DNA, 519 bp, Eucalyptus grandis
  misc_feature (1)...(519): n = A,T,C or G
gaaggacggtncgaacgggtcgtacaagacgattgcggaggcgataaagaaggcgccggagagcagtggccggaggatcatcatctacgtgcgagccgggaggtacgaggaggataacttgaaggtggggaagaagaagacgaacctcatgttcatcggcgatgggaagggcagaacggtcataacgggcggcaaaagtgtagccgacaagatgaccacgttccacaccgcctccttcgcggcgagcggagccggtttcattgcccgcgacatgaccttcgagaactacgccgggccggagaagcaccaggcggtggctctccgggtaggagctgaccatggcgtggtctataggtgcagcatcgttggctatcaggacacgctctacgtccactcgaatcgccagttcttccgtgaatgcgacatctacgggaccgttgacttcatctttggcaacgcagcccgtggtcatncaaaagagcaacatctatgcccggaagcccatggccaagcaaaaga

SEQ ID NO: 412 - DNA, 395 bp, Eucalyptus grandis
ccttcatccattctccactcccctgcccccacacagtacaagaaatgggtcgcggcggcaagctcgggccctcctccgatccccagctcgaggatgccctcccttccccaccggaggcgataaagaaggcgccggagagcagtggccggaggatcatcatctacgtgcgaaccgggaggtacgaggaggataacttgaaggtggggaagaagaagacgaacctcatgttcatcggcgatgggaagggcagaacggtcataacgggcggcaaaagtgtagccgacaagatgaccacgttccacaccgcctccttcgcggcgagcggagccggtttcattgcccgcgacatgaccttcgagaactacgccgggccggagaagcaccaggcggtggct

SEQ ID NO: 413 - DNA, 499 bp, Eucalyptus grandis
tgagcagttcactcacaaattacatcacctgcttggacggtttcgaaggctcgtcatcagctaaatcttcgatcaagcctattctcagcgacttgatatcgagggcaagaacttctctagccatatttgtttctacttcatctcctgaaggacgaagaccagatgttctggagtccttgatcggtgatttcccatcatgggtcacacgaaaagatcatcgtctcctgcaatctctggtgaacgcagttaatgccgacgtggtggtggcgaaggacggaactgggaagttcaagacagtgaaagaggcgatcgcagctgctcctagcaaagcccagacccggtacgttatttatgtgaagaaaggcacatacaaggagaatgtggaggtggcaaagacaaagacaaacatcatgcttgttggcgacggcatggattcaactgtgatcactgcaagcctcaacgtcattgacggtgcgacaacattcaattccgcactggt

SEQ ID NO: 414 - DNA, 497 bp, Eucalyptus grandis
gccggtgacaggaggctgctgcagtcgacggcggtgattccggatgtggtggtggcggcggacgggactgggaactacacgacgatctcggaggcagtggcggcggcgccggagaagagcagcaagcggtacgtgataaggataaagaccggggtgtacagagagaacgtgcaggtgccgaagaagaagaccaacctgactttcatcggcgacgggcggaccaccaccatcatcaccggcgaccggagcgtgaagggcggcttcaccaccttcgagtccgccactgtcgcggtgcttggcgagcgattcttggccaaaaacataaccttccagaacaccgccggcccttcaaaccaccaggccgttgccctccgtgttggtgccgatctatctgccatttacgaatgcgacatcctcgcctaccaggacaccctctatgtccacaaaaaccgccaattctttgtcaagtgcttaattgccggcacagtcgacttcat

SEQ ID NO: 415 - DNA, 295 bp, Eucalyptus grandis
gcgggacgtacaagacgattgcggaggcgataaagaaggcgccggagagcagtggccggaggatcatcatctacgtgcgagccgggaggtacgaggaggataacttgaaggtggggaagaagaagacgaacctcatgttcatcggcgatgggaagggcagaacggtcataacgggcggcaaaagtgtagccgacaagatgaccacgttccacaccgcctccttcgcggcgagcggagccggtttcattgcccgcgacatgaccttcgagaactacgccgggccggagaagcacca

SEQ ID NO: 416 - DNA, 433 bp, Eucalyptus grandis
ttcggggtgaatgtgatcgcccatgtaggacaacatgtacacaaccctcgagtacatcttccatggccgcccgaggtacgtcgggatgcttcctttagatgcctcgagatctggagcggcgacgatctggcaagcatggatcgaaatgccggtgttctggttggggtccttgcggttctgggccgtgatggtgttcttttgcttggccatgggcttccgggcatagatgttgctcttttggatgaccacggctgcgttgccaaagatgaagtcaacggtcccgtagatgtcgcattcacggaagaactggcgattcgagtggacgtagagcgtgtcctgatagccaacgatgctgcacctatagaccacgccatggtcagctcctacccggagagccaccgcctggtgcttctccggcccggcgtagttctcg

SEQ ID NO: 417 - DNA, 414 bp, Eucalyptus grandis
  misc_feature (1)...(414): n = A,T,C or G
ggcgtccgaggtgatgcggcagccctggattgtgaacccagtgttctggcccgggtcactgcgcccgttggcgaggatcacggtataggctgagttcccagactttcgcaacaccagctcacagttctggaagacggcagctgcgttcccaaagataaaatctatggtgccatagatgtcgcactcacggtagaactggcggagtacgagcgcgtacaatgtgtcctggtagcccgcgatgctgcacctatagaatgccgcgtgatcggaggccacggntagggcgacagcttgttgaccttggggccccgctgtgttttggaacccgatgtctngggctataaatccatcgccggtgattgtgaatgtagcagagccgcgcaaggaagacccccagccacactatcatcaccg

SEQ ID NO: 418 - DNA, 382 bp, Eucalyptus grandis
ggctgatggacgtggcgggaggaggagggggagtaccgaagcccgacggcggcggcgctgagtatccagagtggctaggggagagagagagggagctgctggacatgccggcggcggaggtacaggcggacatagtggtggcgaaggacggagcgagcgggacgtacaagacgattgcggaggcgataaagaaggcgccggagagcagtggccggaggatcatcatctacgtgcgagccgggaggtacgaggaggataacttgaaggtggggaagaagaagacgaacctcatgttcatcggcgatgggaagggcagaacggtcataacgggcggcaaaagtgtagccgacaagatgaccacgttccacaccgcctccttctc

SEQ ID NO: 419 - DNA, 247 bp, Eucalyptus grandis
  misc_feature (1)...(247): n = A,T,C or G
ccgccgtgctccaggactgcgacatccacgcgagacgccccaaccctggccagcgcaacatggtcaccgcccagggccgngatgatcccaaccagaacacaggtatagtgatccaaaagtgcaggatcggcgcgacatcanatctcttggcagtgaaagggagcttccaaacttatctgggaaggccatggaagatgtactcgaggacggtgataatgcagaccgccataagcgacgtgatcaaccc

SEQ ID NO: 420 - DNA, 471 bp, Eucalyptus grandis
gcgacatgacctttgagaactacgccgggccggagaagcaccaggcggtggctctccgggtaggagctgaccatggcgtggtctataggtgcagcatcgttggctatcaggacacgctctacgtccactcgaatcgccagttcttccgtgaatgcgacatctacgggaccgttgacttcatctttggcaacgcagccgtggtcatccaaaagagcaacatctatgcccggaagcccatggccaagcaaaagaacaccatcacggcccagaaccgcaaggaccccaaccagaacaccggcatttcgatccatgcttgccagatcgtcgccgctccagatctcgaggcatctaaaggaagcatcccgacgtacctcgggcggccatggaagatgtactcgagggtcgtgtacatgttgtcctacatgggcgatcacattcaccccgaagggtggctggagtggaacggagact

SEQ ID NO: 421 - DNA, 371 bp, Eucalyptus grandis
  misc_feature (1)...(371): n = A,T,C or G
ngaagacgaacctcatgttcatcggcgatgggaagggcagaacggtcataacgggcggcaaaagtgtagccgacaagatgaccacgttccacaccgcctccttcgcggcgagcggagccggtttcattgcccgcgacatgaccttcgagaactacgccgggccggagaagcaccaggcggtggctctccgggtaggagctgaccatggagtggtctataggtgcagcatcgttggctatcaggacacgctctacgtccactcgaatcgccagttcttccgtgaatgcgacatctacgggaccgttgacttcatctttggcaacgcagccgtggtcatccaaaagagcaacatctatgcccggaagcccatg

SEQ ID NO: 422 - DNA, 349 bp, Eucalyptus grandis
ccgggacctacaacgagacggtgctgctggacaagagcaagtggaacgtgctgatgtacggcgacgggaagacgaagaccatcgtcaccggcagcaagaacttcatcgacggcactccgactttcagcacggcgaccttcgctgttgcgggtaaagggtttattgcgagagacatgatgttcgtgaacacagccggcgcggcgaagcaccaggcagtggcgttccggtctgggtccgacctctcggtgatataccgctgcgcctttgatgcgtaccaggacacgctctatgcgcactcgaaccgccagttctaccgcgactgcgacatcacgggcacgatcgacttcat

SEQ ID NO: 423 - DNA, 357 bp, Eucalyptus grandis
ggaggttgctgcaaatgccggtgacggcgatacaggcggacgtgacggtatcgaaggacgggaacgggacgtgcaagacgatctcggaggccatcaagaaggcgccggactacggtacccgccggtttatcatatacgtgcgagccggaaggtacgaggaagataatctgaaggtggggaggaagaagacgaacgtgatgttcgtaggggacgggaagagcaacaccatcatctccggcggcaagagcatcttcgacaacatgacgacgttccacaccgcgtccttcgctgccaccggagccgggttcatcgctcgggacatccgttcgagaactgggctgggcccgccaagcacca

SEQ ID NO: 424 - DNA, 346 bp, Eucalyptus grandis
gggggcggcggcggcgagtatccagagtggctaggggagagagagagggagctgctggacatgccggcggcggaggtacaggcggacatagtggtggcgaaggacggagcgaacgggacgtacaagacgatcgcggaggcgataaagaaggcgccggagagcagtggccggaggatcatcatctacgtgcaagccgggaggtacgaagaggataacttgaaggtggggaagaagaagacgaacctcatgttcatcggcgatgggaagggcaaaacggtcataacgggcggcaaaagtgtagccgacaagatgaccacgttccacaccgcctccttcgcggcgagcg

SEQ ID NO: 425 - DNA, 577 bp, Eucalyptus grandis
  misc_feature (1)...(577): n = A,T,C or G
gcgacggccggaccaccaccatcatcaccggcgaccggacgtgaagggcggcttcaccaccttcgagtccgccaccgtcgcggtggttggcgagcgattcttggccaaaagcataaccttccagaacaccgntggcccttcaaaccaccaggccgttgcgctccgggttggcgccgatctatcagccttttacgaatgcgacatcctcgcctaccaagataccctctatgtccacaacaaccgccaattctttgtcaagtgcttaattgccggcacagtcgacttcatctttggtaacgcagctgtcgtcatccaagactgtgacatccatgcccgcaagccaaaccctggccaaaagaacatggttactgctcaaggacgaattgacccgaaccaaaacacgggaatcgtgatccaaaaatgcaggattgctgagaccaacgatctccgatcagtgaagagcagtttcccaacgtacctcggtcgtccatggaaggagtactcgaggacagtgattatgcaatcatcgatctcggacgtaatcgacccggtgggttggcacgagtggagtgggacc

SEQ ID NO: 426 - DNA, 283 bp, Eucalyptus grandis
aaagaccggggtgtacagagagaacgtgcaggtgccgaagaagaagaccaacctgactttcatcggcgacgggcggaccaccaccatcatcaccggcgaccggagcgtgaagggcggcttcaccaccttcgagtccgccactgtcgcggtgcttggcgagcgattcttggccaaaaacataaccttccagaacaccgccggcccttcaaaccaccaggccgttgccctccgtgttggtgccgatctatctgccatttacgaatgcgacatcctcgcctaccag

SEQ ID NO: 427 - DNA, 345 bp, Eucalyptus grandis
ccaccgtcggagtgcttggcgacggattcatggcaaccgggctcacgatccagaacaccgcgggtccagacgcccaccaggcggtggcattccggtcggacagcgatttctcggtcatcgagaactgcgagttcctgggaaaccaggacacgctctatgcccacgccctccggcagtactacaagtcctgccacatcgagggcaatgtggacttcatctttgggaactcggcctcctacttccaggactgccagatcctggtccgcccccggcaggtcaagcccgagaagggcgagagcaatgctgtcacagcccatggccggaccgaccccgcgcagtcgacag

SEQ ID NO: 428 - DNA, 478 bp, Eucalyptus grandis
tgagcagttcactcacaaattacatcacctgcttggacggtttcgaaggctcgtcatcagctaaatcttcgatcaagcctattctcagcgacttgatatcgagggcaagaacttctctagccatatttgtttctacttcatctcctgaaggacgaagaccagatgttctggagtccttgatcggtgatttcccatcatgggtcacacgaaaagatcatcgtctcctgcaatctctggtgaacgcagttaatgccgacgtggtggtggcgaaggacggaactgggaagttcaagacagtgaaagaggcgatcgcagctgctcctagcaaagcccagacccggtacgttatttatgtgaagaaaggcacatacaaggagaatgtggaggtggcaaagacaaagacaaacatcatgcttgttggcgacggcatggattcaactgtgatcactggcagcctcaacgtcattgacggtgcgac

SEQ ID NO: 429 - DNA, 335 bp, Eucalyptus grandis
  misc_feature (1)...(335): n = A,T,C or G
tttttttttttttttttttttaatcnccaaacattccaaattattgaattcacaacacaacttacagaaactcccccagaaagaaaggaccaatactcatttttcacagcccttcagtgtaagacactccagtggacttcaaccaagtccctccctgaatcagctcggccacggngaacttcttcgcctctgctgggctggtgatgacatgataacctggccacttcacccgcttgctcgttcccgcgcctggtcccttgttcatgtactccccgtagtacanagtcttgagggcatgatcgccgctccacaccgaccaccctgtgggatcaatg

SEQ ID NO: 430 - DNA, 361 bp, Eucalyptus grandis
  misc_feature (1)...(361): n = A,T,C or G
tttttttttttttttttttttaatctccaaacattccaaattattgaattcacaacacaacttacagaaactcccccagaaagaaaggaccaatactcatttttcacagcccttcagtgtaagacactccagtggacttcaaccaagtccctccctgaatcagctcggccacggngaacttcttcgcctctgctgggctggtgatgacatgataacctggccacttcacccgcttgctcgttcccgcgcctggtcccttgttcatgtactccccgtagtacagagtcttgagggcatgatcgccgctccacaccgaccaccctgtgggatcaatgtgatcaccaatgtttgattgcatcac

SEQ ID NO: 431 - DNA, 368 bp, Eucalyptus grandis
ttttttttttttttttacgatcaaatctccaaacattccaaattattgaattcacaacacaacttacagaaactcccccagaaagaaaggaccaatactcatttttcacagcccttcagtgtaagacactccagtggacttcaaccaagtccctccctgaatcagctcggccacggtgaacttcttcgcctctgctgggctggtgatgacatgataacctggccacttcacccgcttgctcgttcccgcgcctggtcccttgttcatgtactccccgtagtacagagtcttgagggcatgatcgccgctccacaccgaccaccctgtgggatcaatgtgatcaccaatgtttgattgcatcccacagt

SEQ ID NO: 432 - DNA, 324 bp, Eucalyptus grandis
cccaaccagaacaccggcatttcgatccatgcttgccagatcgtcgccgctccagatctcgaggcatctaaaggaagcatcccgacgtacctcgggcggccatggaagatgtactcgagggttgtgtacatgttgtcctacatgggcgatcacattcaccccgaagggtggctggagtggaacggagactttgcgctagacactttgtattacggagagtacatgaacgatgggcctggggcagccgtcggcctacgtgtgaaatggcctggtttccgagtcatcacatccacaacagaggcaaacaaattcacagtcgcgcag

SEQ ID NO: 433 - DNA, 460 bp, Eucalyptus grandis
gcccgacggcggcggcggcgagtatccagagtggctaggggagagagagagggagctgctggacatgccggcggcggaggtacaggcggacatagtggtggcgaaggacggagcgagcgggacgtacaagacgattgcggaggcgataaagaaggcgccggagagcagtggccggaggatcatcatctacgtgcgagccgggaggtacgaggaggataacttgaaggtggggaagaagaagacgaacctcatgttcatcggcgatgggaagggcagaacggtcataacgggcggcaaaagtgtagccgacaagatgaccacgttccacaccgcctccttcggtaaatttctgtgctcatatccgaatttctaatgttcaaactctcgactaagctaggccaaaaattataaataatcttttttgtctaaataatttattttttacgaaacaaatcgaacc

SEQ ID NO: 434 - DNA, 344 bp, Eucalyptus grandis
aggacggaactgggaagttcaagacagtgaaagaggcgatcgcagctgctcctagcaaagcccagacccggtacgttatttatgtgaagaaaggcacatacaaggagaatgtggaggtggcaaagacaaagacaaacatcatgcttgttggcgacggcatggattcaactgtgatcactggcagcctcaacgtcattgacggtgcgacaacattcaattccgcaactgttgctgtgaatggcgatgggttcatagcccaggacatatggttccagaacactgccgggccgcagaaacaccaggccgtcgcactccgtgtcagtgcagacaagtcagtcatcaac

SEQ ID NO: 435 - DNA, 295 bp, Pinus radiata
acgagctcgagacatgaccttcgagaacacggaaggacccgcgaacaccaggcggtggccctgcgtgtgggatcagatctctcggctttctatcgctgcagcttcaagggttaccaggacaccctttacgcccattcccttcgtcagttttacagagaatgcaacatctatggcaccgtagatttcatcttcggcaactccgccgtcgtttttcaggattgcaatttgctggcgcggagacccctggagaatcagacgattctttacaccgctcagggcaggcaggaccccaatg

SEQ ID NO: 436 - DNA, 332 bp, Pinus radiata
tgcaggtatttgttgcacgtgacatgagctttatgaacagtgcagggcctgacaagcatcaagctgtggctctacgggtgggggccgattttgcagcgatttatcgatgcagtattattggttaccaagacacactttatgttcactctctgaggcagttttacagagaatgtgacgtgttcggaacagtggacttcatttttggcaatgcagccgtggttttacaggagtgtaacatttatgctcgacaaggcatgcccaatcaagtgaatgtaatcactgcccaaggaaggaatcatccttatcaaaataccggcatctcaatacataat

SEQ ID NO: 437 - DNA, 301 bp, Pinus radiata
gcggccccagagaaaagtggtaagagatatgtgatcaaggtgaagaagggaacgttacaaggagaacgtggaggtgggtaaaacgaagactaatatcatgttgattggagaaggcatggaggccacaatcgttacagggagcagaaatgtgatagacggatccaccactttcaattcagccacattcgctgctgtagggaagggatttatggcacaagacatggcgttcgtcaacacagcaggcccggacaaacatcaggcggtggctcttcgagtaggtcagatcaatcagtgttatatc

SEQ ID NO: 438 - DNA, 242 bp, Pinus radiata
gaagaagggaacgtacaaggagaacgtggaggtgggtaaaacgaagactaatatcatgttgattggagaaggcatggaggccacaatcgttacagggagcagaaatgtgatagacggatccaccactttcaattcagccacattcgctgctgtagggaagggatttatggcacaagacatggcgttcgtcaacacagcaggcccggacaaacatcaggcggtggctcttcgagtaggatcag

SEQ ID NO: 439 - DNA, 255 bp, Pinus radiata
acttaactccggtggaaggtaaccatgaatctccttcaatgaattttgagactgtaaatgaactggcctcgcttgagctattaatcactcgataccccgcccatttgacccgatttgtagtgcccgcaccagggccgcggttcatgtattccccatagtatagggtgctgagagcgaaggatccattccattcgagccaaccggcaggttgaatcaggtcgcccagaaaggactgcatgaagacagtgcgagagt

SEQ ID NO: 440 - DNA, 362 bp, Pinus radiata
gtggactgcagccatgaatctccttgtatgaattctccaacagtaaacttgctcgcctcttgagaacttgtgattacccgatacccggcccatttcacgcggttagcagttgctgctcctgggcctgtattcatgtattctccataatacaaagtttgcaatgcaaaacttccattccattccagccagcccgcaggctgaataacatcgtctagataggactgcatgtaaaccgttcgggaatactccttccacggcctccccagatatgttgggaatgagcttttcaccggaacaaggtcggaatcgggagtgatcttgcagttgtgaatggaagttcctgtgttctggttcggatcagt

SEQ ID NO: 441 - DNA, 286 bp, Pinus radiata
aagaaaactaatatcatgttcgttggagatggtatggatgtcacagtggtgaccggaaaccgaaatgtgaaggacaatttcacaacctttcgttctgcaactgttgctgtgactggaaatggattcatcgctcgcgacatgaccttcgagaacacggcaggacccgcgaagcaccaggcggtggccctgcgtgtgggatcagatctttcggctttctatcgatgcagcttcaagggttaccaggacaccctttacgcccattcccttcgtcaagtttttacagaga

SEQ ID NO: 442 - DNA, 302 bp, Pinus radiata
ggagaagagccagacgagatacgtaattcatataaaagcaggagtttatgcagagaatgtggagttgcacaagaagaaaactaatatcatgttcgttggagatggtatggatgtcacagtggtgaccggaaaccgaaatgtgaaggacaatttcacaacctttcgttctgcaactgttgctgtgactggaaatggattcatcgctcgcgacatgaccttcgagaacacggcaggacccgcgaagcaccaggcggtggccctgcgtgtgggatcagatctttcggctttctatcgatgcagct

SEQ ID NO: 443 - DNA, 466 bp, Pinus radiata
gaaatcgtgagaattccaccgagcaagacgaatctcatgtttgttggagatggcatggatcgaactatcgtcaccggatcattgtctgcccagattcccggcgtcggcacacacggctctgcaactgtcggggtgaacgcggacggttttgttgcgcgagacattgcgttcgagaatactgcggggccggagatgcatcaggctgttgccctcagagtcgatagcgatctctcagcattcgagaggtgcgcctttctcggacaccaggacaccctatacgcgcacgccctccgccagttttatcggaattgcaggatcgaaggcaacgtcgacttcatatttggaaacgcagcggccatcttccacaactgctccattctcgtccgccctcgccaggtgccgtctaatctttccgaagcgaaccccataactgcccacgggcgattggatccgggtcagactactg

SEQ ID NO: 444 - DNA, 345 bp, Pinus radiata
ggatacactacaaaaacgatagaaaaagaaatacagacactacagacacagacgaacttcaaaaattgaaagcgaactacagacacagacgaacttcttcaaaagtttggcgaagtcgctaatttatcaatccgtcgatgtagtcgatgccagtggactgcaaccaggaatttccttgtatgaattctcccactgtaaatttgctcgcctcttgagaacttttgatcacccgatacccaggccatttcacacggtttccagtagcggagcctggccctgtattcatatattctccataatacaaagttttcaaagcaaaagctccatcccattccagccagcccg

SEQ ID NO: 445 - DNA, 183 bp, Pinus radiata
  misc_feature (1)...(183): n = A,T,C or G
acgcgcattcnccgcgccaattctacagggagtgtaacattttgggcactgtagatttcatatttgggaatgccgcagtggtgtttcagagctgcaatctgatgcccaggaaacccggtgcaaatcagaaaaatgccatcacagcacagggcagaactgatccgaaccaaaacacaggaactt

SEQ ID NO: 446 - DNA, 264 bp, Pinus radiata
acgctgcaatcttgcagcgatataacaccgattgatctgatcctactcgaagagccaccgcctgatgtttgtccgggcctgctgtgttgacgaacgccatgtcttgtgccataaatcccttccctacagcagcgaatgtggctgaattgaaagtggtggatccgtctatcacatttctgctccctgtaacgattgtggcctccatgccttctccaatcaacatgatattagtcttctttttacccacctccacgttctccttgt

SEQ ID NO: 447 - DNA, 417 bp, Pinus radiata
agagaatgcaacatctatggcaccgtagatgttgcattctctgtaaaactgacgaagggaatgggcgtatagggtgtcctggtaacccttgaagctgcaacgatagaaagccgagagatctgatcccacacgcagggccaccgcctggtgcttcgcgggtcctgccgtgttctcgaaggtcatgtcgcgagcgatgaatccatttccagtcacagcaacagttgcagaacgaaaggttgtgaaattgtccttcacatttcggtttccggtcaccactgtgacatccataccatctccaacgaacatgatattagttttcttcttgtgcaactccacattctctgcataaactcctgcttttatatgaattacgtatctcgtctggctcttctccggagccttctccactgcctctgt

SEQ ID NO: 448 - DNA, 404 bp, Pinus radiata
attatatctcagctgacataaatatatattaaaaattacagcatacaatggaactttgactgcagagcagagaaaagaaagcccttaatttattggccacctggcttgcaatattctattgcattttagagtacagcagaataatatacacgtcagccttaatttcagaaaaataaataaactacgtgagcagccctccaataaaaacgatcccagtggatggcaaccatttagcaccagagatgaactgggccaccgtgaatggataaacttcctgcgccgctttgaaaatcctgtaaccaggccacgtcacccgcctcgcaagccctgcgccggggccactgttcatatattccccataaaataaggtatccagtgcgaagtctccgaaccactccaaccat

SEQ ID NO: 449 - DNA, 173 bp, Pinus radiata
gcctcgctggagctcttaatcgctcgatatcctggccatttgacccggcctgcagtgtttgcgccagggccgcggttcatgtattccccataatagagggtactcagtgcgaaggttccattccattcgagccaacccgctggctgaatcatgtcgccaagaaacgattgcat

SEQ ID NO: 450 - DNA, 398 bp, Pinus radiata
ggctctgagagtaggagcggattttgcagccttttaccgttgcagcgtcatcggttaccaggacacactgtacgtacattctctccgccaattttacagagaatgcgacatctacggcacagtggacttcatctttggcaacgcagccgtggtgttgcagaagtgcaccatgttcgccagaaaacccctgcccaactccaagatcacggtgacggctcagggcaggaaggaccccaaccagaacaccggcatctccatccacgactgcagagtgacggcggcggcggatcttgctcccgtcaagggcctctatcgcgcttacctcgggaggccctggaaattatactctcgcacggtatacctgcaaacttttttggatgatattattgaccctgccg

SEQ ID NO: 451 - DNA, 404 bp, Pinus radiata
agagaatgcaacatctatggcaccgtagatgttgcattctctgtaaaactgacgaagggaatgggcgtatagggtgtcctggtaacccttgaagctgcaacgatagaaagccgagagatctgatcccacacgcagggccaccgcctggtgcttcgcgggtcctgccgtgttctcgaaggtcatgtcgcgagcgatgaatccatttccagtcacagcaacagttgcagaacgaaaggttgtgaaattgtccttcacatttcggtttccggtcaccactgtgacatccataccatctccaacgaacatgatattagttttcttcttgtgcaactccacattctctgcataaactcctgcttttatatgaattacgtatctcgtctggctcttctccggagccttct

SEQ ID NO: 452 - DNA, 394 bp, Pinus radiata
agagaatgcaacatctatggcaccgtagatgttgcattctctgtaaaactgacgaagggaatgggcgtatagggtgtcctggtaacccttgaagctgcaacgatagaaagccgagagatctgatcccacacgcagggccaccgcctggtgcttcgcgggtcctgccgtgttctcgaaggtcatgtcgcgagcgatgaatccatttccagtcacagcaacagttgcagaacgaaaggttgtgaaattgtccttcacatttcggtttccggtcaccactgtgacatccataccatctccaacgaacatgatattagttttcttcttgtgcaactccacattctctgcataaactcctgcttttatatgaattacgtatctcgtctggctcttctcc

SEQ ID NO: 453 - DNA, 428 bp, Pinus radiata
attatatctcagctgacataaatatatattaaaaattacagcatacaatggaactttgactgcagagcagagaaaagaaagcccttaatttattggccacctggcttgcaatattctattgcattttagagtacagcagaataatatacacgtcagccttaatttcagaaaaataaataaactacgtgagcagccctccaataaaaacgatcccagtggatggcaaccatttagcaccagagatgaactgggccaccgtgaatggataaacttcctgcgccgctttgaaaatcctgtaaccaggccacgtcacccgcctcgcaagccctgcgccggggccactgttcatatattccccataaaataaggtatccagtgcgaagtctccgaaccctccaaccatccggcagggtcaataatatcatcct

SEQ ID NO: 454 - DNA, 329 bp, Pinus radiata
gcaaatcagaaaaatgcaatcaccgcacagggcagaactgatccgaaccagaacacaggaacttccattcacaactgcaagatcactcccgatgccgaccttgttccggtgaaaagctcattcccaacatatctggggaggccgtggaaggagtattcccgaacggtttacatgcagtcctatctagacgatgttattcagcctgcgggctggctggaatggaatggaagttttgcattgcaaactttgtattatggagaatacatgaatacaggcccaggagcagcaactgctaaccgcgtgaaatgggccgggtatcgggtaatcac

SEQ ID NO: 455 - DNA, 358 bp, Pinus radiata
ctacgatcctctccaaacaacgtagtgccaaacgtgatcgtggctaaggatggctctggaaatttcaaaacgatttcacaagccatagctgcggccccagagaaaagtggtaagagatatgtgatcaaggtgaagaagggaacgtacaaggagaacgtggaggtgggtaaaacgaagactaatatcatgttgattggagaaggcatggaggccacaatcgttacagggagcagaaatgtgatagacggatccaccactttcaattcagccacattcgctgctgtagggaagggatttatggcacaagacatggcgttcgtcaacacagcaggcccggacaaacatcaggcggtggctc

SEQ ID NO: 456 - DNA, 195 bp, Pinus radiata
cgtggaggtgggtaaaacgaagactaatatcatgttgattggagaaggcatggaggccacaatcgttacagggagcagaaatgtgatagacggatccaccactttcaattcagccacattcgctgctgtagggaagggatttatggcacaagacatggcgttcgtcaacacagcaggcccggacaaacatcaggc

SEQ ID NO: 457 - DNA, 405 bp, Pinus radiata
ttcgcggccgcgtcgacgtaattctctggcaatagcaaagctggcgcaggagtcagtaatgcccgatccatctcccgagatacgcctcccgtccgattccatcaaggatgattttccttcatggctatctgcaggagatcggaggctcctacgatcctctccaaacaacgtagtgccaaacgtgatcgtggctaaggatggctctggaaatttcaaaacgatttcacaagccatagctgcggccccagagaaaagtggtaagagatatgtgatcaaggtgaagaagggaacgtacaaggagaacgtggaggtgggtaaaacgaagactaatatcatgttgattggagaaggcatggaggccacaatcgttacagggagcagaaatgtgatagacggatccaccac

SEQ ID NO: 458 - DNA, 326 bp, Pinus radiata
cgtggaacatggatggcctacaagacactcgacagcaaacgaaacatagtcaaaacattagcgaagcgacgtcactagtctgttaatccgtccacataatcgacaccggtggactgcagccatgaatctccttgtatgaattctccaacagtaaacttgctcgcctcttgagaacttgtgattacccgatacccggcccatttcacgcggttagcagttgctgctcctgggcctgtattcatgtattctccataatacaaagtttgcaatgcaaaacttccattccattccagccagcccgcaggctgaataacatcgtctagata

SEQ ID NO: 459 - DNA, 360 bp, Pinus radiata
  misc_feature (1)...(360): n = A,T,C or G
tcgacctacgatcctctccaaacaacgtagtgccaaacgtgatcgtggctaaggatggctctggaaatttcaaaacgatttcacaagccatagctgcggccccagagaaaagtggtaagagatatgtgatcaaggtgaagaagggaacgtacaaggagaacgtggaggtgggtaaaacgaagactaatatcatgttgattggagaaggcatggaggccacaatcgttacagggagcagaatgtgatagacggatcnccactttcaattcagccacattcgctgctgtagggaagggatttatggcacaagacatggcgttcgtcaacacagcaggcccggacaaacatcaggcggtggct

SEQ ID NO: 460 - DNA, 438 bp, Pinus radiata
cgtggaacatggatggcctacaagacactcgacagcaaacgaaacatagtcaaaacattagcgaagcgacgtcactagtctgttaatccgtccacataatcgacaccggtggactgcagccatgaatctccttgtatgaattctccaacagtaaacttgctcgcctcttgagaacttgtgattacccgatacccggcccatttcacgcggttagcagttgctgctcctgggcctgtattcatgtattctccataatacaaagtttgcaatgcaaaacttccattccattccagccagcccgcaggctgaataacatcgtctagataggactgcatgtaaaccgttcgggaatactccttccacggcctccccagatatgttgggaatgagcttttcaccggaacaaggtcggcatcgggagtgatcttgcagttgtga

SEQ ID NO: 461 - DNA, 380 bp, Pinus radiata
agagaatgcaacatctatggcaccgtagatgttgcattctctgtaaaactgacgaagggaatgggcgtatagggtgtcctggtaacccttgaagctgcaacgatagaaagccgagagatctgatcccacacgcagggccaccgcctggtgcttcgcgggtcctgccgtgttctcgaaggtcatgtcgcgagcgatgaatccatttccagtcacagcaacagttgcagaacgaaaggttgtgaaattgtccttcacatttcggtttccggtcaccactgtgacatccataccatctccaacgaacatgatattaagttttcttcttgtgcaactccacattctctgcataaactcctgctttatatgaatacgtatctcgt

SEQ ID NO: 462 - DNA, 439 bp, Pinus radiata
agagaatgcaacatctatggcaccgtagatgttgcattctctgtaaaactgacgaagggaatgggcgtatagggtgtcctggtaacccttgaagctgcaacgatagaaagccgagagatctgatcccacacgcagggccaccgcctggtgcttcgcgggtcctgccgtgttctcgaaggtcatgtcgcgagcgatgaatccatttccagtcacagcaacagttgcagaacgaaaggttgtgaaattgtccttcacatttcggtttccggtcaccactgtgacatccataccatctccaacgaacatgatattagttttcttcttgtgcaactccacattctctgcataaactcctgcttttatatgaattacgtatctcgtctggctcttctccggagccttctccactgcctctgtaatgttcgtgtaatttccactg

SEQ ID NO: 463 - DNA, 441 bp, Pinus radiata
  misc_feature (1)...(441): n = A,T,C or G
gtgaacataccttccaccaaggccttcataacgctggaaggagacggcgcagactccaccattatacaatggtccgacacggctgggactcccggacccaacggtaaagcgttgggtacatataacagcgctactgttgcagtcaattcgccttacttcatcgccagaaacattacgtttcanaacacagccccggttcctctgccgggggcggtgggcagacaagcagtggccttgagaatcacgggagacacgtcgtccttcttcgggtgcagcttcttgggcgcgcaggacactttgtatgaccacgctggccgccattatttcaaagactgttatatcgaaggctccgtcgatttcatcttcgggaacggcctctccctctacgaggggtgcagcctgcatgggatttccgatacctacggcgcggtgacagcgcag

SEQ ID NO: 464 - DNA, 481 bp, Pinus radiata
tgatccctgacattactgtgtcaaagctggatcagaaatcctctctatcaagcattcagcaagctgtgaacagtgcgccggactactcggaaaagaaatttgtgatcaagatacaggccggggtttacggggaaacggttcgaatcccccgcagtaagacgaatctcgtgtttgtgggcgccggtatggataaaacggtgatcaccggttctgcatatgtgccgtctctgcccggcccgctcacaatttacgatgtcgccacggttggagtgaatggggacggcttcatagcccgtgacataacattccgaaacacatttcaggggccacagactcatcaagccgtggccctgagagtagacagcgatttttctgccttctacagctgcgctttcgagagccaccaggacacgctctacacgcacacgctccgccaattctacagaaattgcagaatagagggcacccacgacttcatctt

SEQ ID NO: 465 - DNA, 505 bp, Pinus radiata
gcaattctctggccatgttccagatcttgttctgcaacaccacaaaatctgacattggtgcccttcagggtcatgattatcatgtacagacaaacaactttacagtcccatcgtctcctccaacaaaaaggcgacgccttttggcagaggcaggggaagaaatgaacaatgctcttcggaatcaagaattttatgaccattatggattgattcatggaggggcgcagcatgaatttcctcggtggttatcttcccgagatcgcaggcttttgaaactgcccgttgctgccatgcaacctgatgctgttgtggccttggatggaagtggcaagtataagagcatagttgatgctgtcaacgatgcaccttccctgctaagcagcagaaggtatatcatctatgtgaaaacaggcgtgtataacgaaaatgtcacgatttcaaggaagaagaccaatctcatgattgttggtgatggcattggaaaaactattgtagcagcaggcaa

SEQ ID NO: 466 - DNA, 361 bp, Pinus radiata
  misc_feature (1)...(361): n = A,T,C or G
cggaggctcctacgctcctttccaaacgacatcgtggctgacgtgatcgtggctcaggatggctctggaaaattcaaaacaattacagaagccatagctgcggccccggagaaaagctctaagagatacgtgatcaaggtgaagaaggggacgtacaaggagaacgtggaagtgggcaaaaagaagacaaatattatgctgatcgganaaggcatggaagccacgatcgttacagggagcagaaatgttgtagacggttccaccactttcaattcctctacactagctgctgtagggaaggggtttatggcacaagacatggcgttcgtcaacaccgcaggtccagataagcatcaagcgg

SEQ ID NO: 467 - DNA, 402 bp, Pinus radiata
cccccgagctacgcctcccgttcgattccatcaaggatgattttccttcatggctatctgcaggagatcggaggctcctacgctcctttccaaacgacatcgtggctgacgtgatcgtggctcaggatggctctggaaaattcaaaacaattacagaagccatagctgcggccccggagaaaagctctaagagatacgtgatcaaggtgaagaaggggacgtacaaggagaacgtggaagtgggcaaaaagaagacaaatattatgctgatcggagaaggcatggaagccacgatcgttacagggagcagaaatgttgtagacggttccaccactttcaattcctctacactagctgctgtagggaaggggtttatggcacaagacatggcgttcgtcaaca

SEQ ID NO: 468 - DNA, 397 bp, Pinus radiata
tgatccctgacattactgtgtcaaagctggatcagaaatcctctctatcaagcattcagcaagctgtgaacagtgcgccggactactcggaaaagaaatttgtgatcaagatacaggccggggtttacggggaaacggttcgaatcccccgcagtaagacgaatctcgtgtttgtgggcgccggtatggataaaacggtgatcaccggttctgcatatgtgccgtctctgcccggcccgctcacaatttacgatgtcgccacggttggagtgaatggggacggcttcatagcccgtgacataacattccgaaacacatttcaggggccacagactcatcaagccgtggccctgagagtagacagcgatttttctgccttctacagctgcgctttcga

SEQ ID NO: 469 - DNA, 349 bp, Pinus radiata
  misc_feature (1)...(349): n = A,T,C or G
gcaggacccgcgaagcaccaggcggtggccctgcgtgtgggatcagatctctnggctttctatcgntgcagcttcaagggttaccaggacaccctatacgcccattcccttcgtcagttttacagagaatgcaacatctatggcaccgtanatttcatcttcggcaactccgccgtcgtttttcaggattgcaatttgctggcgcggagacccctggagaatcagaagattctttacaccgctcacggcaggcaggaccccaatgagaacactggaatttccattcagaactgtaatgtgaccgcagccccagacctggctccagtgaagagctcgttcgatgcatatc

SEQ ID NO: 470 - DNA, 375 bp, Pinus radiata
cggaggctcctacgctcctttccaaacgacatcgtggctgacgtgatcgtggctcaggatggctctggaaaattcaaaacaattacagaagccatagctgcggccccggagaaaagctctaagagatacgtgatcaaggtgaagaaggggacgtacaaggagaacgtggaagtgggcaaaaagaagacaaatattatgctgatcggagaaggcatggaagccacgatcgttacagggagcagaaatgttgtagacggttccaccactttcaattcctctacactagctgctgtagggaaggggtttatggcacaagacatggcgttcgtcaacaccgcaggtccagataagcatcaagcggtggctcttcgtgta

SEQ ID NO: 471 - DNA, 367 bp, Pinus radiata
tgatccctgacattactgtgtcaaagctggatcagaaatcctctctatcaagcattcagcaagctgtgaacagtgcgccggactactcggaaaagaaatttgtgatcaagatacaggccggggtttacggggaaacggttcgaatcccccgcagtaagacgaatctcgtgtttgtgggcgccggtatggataaaacggtgatcaccggttctgcatatgtgccgtctctgcccggcccgctcacaatttacgatgtcgccacggttggagtgaatggggacggcttcatagcccgtgacataacattccgaaacacatttcaggggccacagactcatcaagccgtggccctgagagtagacagcga

SEQ ID NO: 472 - DNA, 446 bp, Pinus radiata
  misc_feature (1)...(446): n = A,T,C or G
cggaggctcctacgctcctttccaaacgacatcgtggctgacgtgatcgtggctcaggatggctctggaaaattcaaaacaattacagaagccatagctgcggccccggagaaaagctctaagagatacgtgatcaaggtgaagaaggggacgtacaaggagaacgtggaagtgggcaaaaagaagacaaatattatgctgatcggagaaggcatggaagccacgatcgttacagggagcanaaatgttgtagacggttccaccactttcaattcctctacactagctgctgtagggaaggggtttatggcacaagacatggcgttcgtnaacaccgcaggtccagataagcatcaagcggtggctcttcgtgtaggatcagaccaatcagtgttatatcgctgcaagattgcagcgtaccaagacacattgtacgcgcattctct

SEQ ID NO: 473 - DNA, 345 bp, Pinus radiata
ggcgcagactccaccattatacaatggtccgacacggctgggactcccggacccaacggtaaagcgttgggtacatataacagcgctactgttgcagtcaattcgccttacttcatcgccagaaacattacgtttcagaacacagccccggttcctctgccgggggcggtgggcagacaagcagtggccttgagaatcacgggagacacgtcgtccttcttcgggtgcagcttcttgggcgcgcaggacactttgtatgaccacgctggccgccattatttcaaagactgttatatcgaaggctccgtcgatttcatcttcgggaacggcctctccctctacgag

SEQ ID NO: 474 - DNA, 268 bp, Pinus radiata
aactaatatcatgttcgttggagatggtatggatgtcacagtggtgaccggaaaccgaaatgtgaaggacaatttcacaacctttcgttctgcgactgttgctgtgactggaaacggattcatcgctcgcgacatgaccttcgagaacacggcaggacccgcgaagcaccaggcggtggccctgcgtgtgggatcagatctctcggctttctatcgatgcagcttcaagggttaccaggacaccctttacgcccattcccttcgtcag

SEQ ID NO: 475 - DNA, 316 bp, Pinus radiata
gccagacgagatacgtaattcatataaaagcaggagtttatgcagagaatgtggagttgcacaagaagaaaactaatatcatgttcgttggagatggtatggatgtcacagtggtgaccggaaaccgaaatgtgaaggacaatttcacaacctttcgttctgcgactgttgctgtgactggaaacggattcatcgctcgcgacatgaccttcgagaacacggcaggacccgcgaagcaccaggcggtggccctgcgtgtgggatcagatctctcggctttctatcgatgcagcttcaagggttaccaggacaccct

SEQ ID NO: 476 - DNA, 440 bp, Pinus radiata
cgagaatagccagacgagatacataattcatataaaagcaggagtttatgcagagaatgtggagttgcacccgacgaaaacaaatatcatgttcattggagatggcatggatgttacagtggtgaccggaaaccgaaatgtgaaggacaaatttacaacctatcgttctgcaactgttgctgtgactggaaacggattcatcgctcgcgacatgaccttcgagaacacggcaggacccacgaagcaccaggcggtggccctgcgtgtgggatcagatctctcggccttctataagtgcaacttcaagggttaccaggacaccctttacgcccattcctttcgtcagttctacagaaaatgcaacatctatggcaccatagatttcatcttcggcaactccgccgtcgtttttcaggattgcaatctcctggcgcggaggc

SEQ ID NO: 477 - DNA, 357 bp, Pinus radiata
gaaacctgagacgtacttaactccggtggaaggtaaccatgaatctccttcaatgaattttgagactgtaaatgactggcctcgcttgagctattaatcactcgataccccgcccatttgacccgatttgtagtgcccgcaccagggccgcggttcatgtattccccatagtacagggtgctgagagcgaaggatccattccattcgagccaaccggcaggttgaatcaggtcgcccagaaaggactgcatgaagacagtgcgagagtactctttccatggcctcccaagatatgcctcgaacgagctcttcactggagccaggtctggggctgcggtcacattacagttctgaatg

SEQ ID NO: 478 - DNA, 318 bp, Pinus radiata
cagaactgcactgtgaccgccgcctcggacctggttccagtgaaaacatcgttcgaggcgtaccttggcaggccgtggagaaattactcgcgcactgtgttcatgaaatcttatctctacgacttgattcagccagcgggttggttggaatggaatggcagcttcgctctgagcactctgtactacggggaatacatgaacagcggccccggcgcgggcactgccaatcgggtcagatgggcggggtatcaggtgattaagaaatccaaggaggccaagaaatttacagtgtctcaattcattgaaggcaattcatgg

SEQ ID NO: 479 - DNA, 271 bp, Eucalyptus grandis
  misc_feature (1)...(271): n = A,T,C or G
gaaattctttggtaacttgatggatgctggattatgctcggtttgtggagaggaaagttttggaactggctctgatcatattcgtgagaaagatgggatatgggctgtgcttgcttggttatctattctcgcttacaaaaataaggagaacttaagtggagaaaagcttgtatctgtcgangacattgtccgtcagcattgggngacatatggtcgtcattattataccagatatgattatgagaatgttgattcaggagcagcaaaggaa

SEQ ID NO: 480 - DNA, 301 bp, Eucalyptus grandis
  misc_feature (1)...(301): n = A,T,C or G
gatgctggattatgctcggcttgtggagaggaaagtcttggaactggctctgatcatattcgtcaganagatgggatatgggctgtgcttgcctggttatctattctcgcttacaaaaataaggagaacttaagtggagaaaagcttgtatctgtcgaggacattgtccgtcagcattgggtgacatatggtcgtcattattataccagatatgattatgagaatgttgattcaggagcagcaaaggaactgatgggatacttggtccaactgcaatcatctctctctgaagtcaaccaga

SEQ ID NO: 481 - DNA, 287 bp, Eucalyptus grandis
aaattctttggtaacttgaatggatgctggattatgctcggtttgtggagaggaaagttttggaactggctctgatcatattcgtgagacagatgggatatgggctgtgcttgcttggttatctattctcgcttacaaaaataaggagaacttaagtggagaaaagcttgtatctgtcgaggacattgtccgtcagcattgggtgacatatggtcgtcattattataccagatatgattatgagaatgttgattcaggagcagcaaaggaactgatgggatacttgg

SEQ ID NO: 482 - DNA, 285 bp, Eucalyptus grandis
gaccatatacgtgaaaaagatggtatctgggctgttttggcatggctttccatccttgcgtacaagaacaaggaaaatatcaatggtggaaagcttgtatcagttgaagatattgttcgccagcactgggcaacttatggtcgccactattacactcgttatgattatgagaatgttgacgcaggggcagcaaaggaactaatggcatacttggtccggttgcaatcttccctcggtgaagttaatgagattgtcaagggagtatgttcggatgtgtcaaatgtt

SEQ ID NO: 483 - DNA, 427 bp, Eucalyptus grandis
cgttcgtgcgctgatattttctctctccggtttccctggccggcggaagcgaatcggcagaaaatggtgacgttccaggtgtcgcgagtggagaccgcgcccttcgatggccagaagcccggcacctccggcctccgcaagaaggtgaaagtttttgtccagccccattacttgcaaaattttgtgcaatcaacattctatgccctttcagctgagaaagtccaaggagctacactcgttgtttctggtgatgggcgttatttctctaaggatgctatccagatcataataaagatgtcagctgcaaatggagtaaggcgtgtctgggtaggtcagaatggattactttccactcctgccgtgtcagctgtgatccgtgaaagagttgggcatgatggtccaaggcacaggagcatttattctgcac

SEQ ID NO: 484 - DNA, 408 bp, Eucalyptus grandis
aaaaaactgtcatctcgccttgctcacttcctcaccacctttcctggcaccatcatcgacatcctccctgtttatgaaaatggtgacgttccaggtgtcgcgagtggagaccgcgcccttcgatggccagaagcccggcacctccggcctccgcaagaaggtgaaagtttttgtccagccccattacttgcaaaattttgtgcaatcaacattctatgccctttcagctgagaaagtccaaggagctacactcgttgttctggtgatgggcgttatttctctaaggatgctatccagatcataataaagatgtcagctgcaaatggagtaaggcgtgtctgggtaggtcagaatggattactttccactcctgccgtgtcagctgtgatccgtgaaagagttgggcat

SEQ ID NO: 485 - DNA, 243 bp, Eucalyptus grandis
gttgaagccataccctacttttctggcggtctcaagggagttgccaagaacatgcctacatcagctgcccttgatgtggttgctcaacatctaaatctgaagttttttgaggtgcctacagggtggaaattctttggtaacttgatggatgctggattatgctcggtttgtggagaggaaagttttggaactggctctgatcatattcgtgagaaagatgggatatgggctgtgcttgcttgg

SEQ ID NO: 486 - DNA, 372 bp, Eucalyptus grandis
  misc_feature (1)...(372): n = A,T,C or G
ccggaggtaagcgaantcggacagaaatggtgcacgttccaggtgtacgcgagtggagaccgcgacccttacgatggccagaagcccggcacctccggcctccgcaagaaggtggaaagtttttgtccagccccattacttgcaaaattttgtgcaatcaacattttatgccctttcagctgagaaagtccaaggagctacactcgttgtttctggtgatgggcgttatttctctaaggatgctatccagatcataataaagatgtcagctgcaaatggagtaaggcgtgtctgggtaggtcagaatggattactttccactcctgccgtgtcagctgtgatccgtgaaagagttgggcatgatggatccaa

SEQ ID NO: 487 - DNA, 511 bp, Eucalyptus grandis
  misc_feature (1)...(511): n = A,T,C or G
gcaccatcatcgacatcctccctgtttctgcgaatcggcagaaaatggtgacgttccaggtgtcgcgagtggagaccgcgcccttcgatggccagaagcccggcacctccggcctccgcaagaagttgaaagtttttgtccagccccattacttgccaaaatttggtgcantcaacattttatgccctttcagctgagaaagtccaaggagctacactcgttgtttctggtgatgggcgttatttctctaaggatgctatccagatcataataaagatgtcagctgcaaatggagtaaggcgtgtctgggtaggtcagaatggattactttccactcctgccgtgtcagctgtgatccgtgaaagagttgggcatgatggatccaaggctacaggagcatttattctgacggcaagtcataatcccggtggtccccatgaggattttggaatcaagtataacatggaaaatggtggacctgctcctgaggcgatcactgataagatgtatg

SEQ ID NO: 488 - DNA, 465 bp, Eucalyptus grandis
  misc_feature (1)...(465): n = A,T,C or G
gcaccatcattngacatcctccctgtttctgcgaatcggcagaaaatggtgacgttccaggtgtcgcgagtggagaccgcgcccttcgatggccagaagcccggcacctccggcctccgcaagaagttgaaagtttttgtccagccccattacttgcaaaattttgtgcaatcaacattttatgccctttcagctgagaaagtccaaggagctacactcgttgtttctggtgatgggcgttatttctctaaggatgctatccagatcataataaagatgtcagctgcaaatggagtaaggcgtgtctgggtaggtcagaatggattactttccactcctgccgtgtcagctgtgatccgtgaaagagttgggcatgatggatccaaggctacaggagcatttattctgacggcaagtcataatcccggtggtccccatgaggattttggaatcaagtataacatg

SEQ ID NO: 489 - DNA, 514 bp, Eucalyptus grandis
ctggcaccatcatcgtcatcctccctgtttctgcgaatcggcagaaaatggtgacgttccaggtgtcgcgagtggagaccgcgcccttcgatggccagaagcccggcacctccggcctccgcaagaaggtgaaagtttttgtccagccccattacttgcaaaattttgtgcaatcaacattttatgccctttcagctgagaaagtccaaggagctacactcgttgtttctggtgatgggcgttatttctctaaggatgctatccagatcataataaagatgtcagctgcaaatggagtaaggcgtgtctgggtaggtcagaatggattactttccactcctgccgtgtcagctgtgatccgtgaaagagttgggcatgatggatccaaggctacaggagcatttattctgacggcaagtcataatcccggtggtccccatgaggattttggaatcaagtataacatggaaaatggtggacctgctcctgaggcgatcactgataagatgtatga

SEQ ID NO: 490 - DNA, 442 bp, Eucalyptus grandis
ctgatatttttctctctccggtttccctggccggcggaagcgaatcggcagaaaatggtgacgttccaggtgtcgcgagtggagaccgcgcccttcgatggccagaagcccggcacctccggcctccgcaagaaggtgaaagtttttgtccagccccattacttgcaaaattttgtgcaatcaacattttatgccctttcagctgagaaagtccaaggagctacactcgttgtttctggtgatgggcgttatttctctaaggatgctatccagatcataataaagatgtcagctgcaaatggagtaaggcgtgtctgggtaggtcagaatggattactttccactcctgccgtgtcagctgtgatccgtgaaagagttgggcatgatggatccaaggctacaggagcatttattctgacggcaagtcataatcccggtggtc

SEQ ID NO: 491 - DNA, 520 bp, Eucalyptus grandis
ctgatatttttctctctccggtttccctggccggcggaagcgaatcggcagaaaatggtgacgttccaggtgtcgcgagtggagaccgcgcccttcgatggccagaagcccggcacctccggcctccgcaagaaggtgaaagtttttgtccagccccattacttgcaaaattttgtgcaatcaacattttatgccctttcagctgagaaagtccaaggagctacactcgttgtttctggtgatgggcgttatttctctaaggatgctatccagatcataataaagatgtcagctgcaaatggagtaaggcgtgtctgggtaggtcagaatggattactttccactcctgccgtgtcagctgtgatccgtgaaagagttgggcatgatggatccaaggctacaggagcatttattctgacggcaagtcataatcccggtggtccccatgaggattttggaatcaagtataacatggaaaatggtggacctgctcctgaggcgatcactgataagatgtatg

SEQ ID NO: 492 - DNA, 418 bp, Eucalyptus grandis
ctgatatttttctctctccggtttccctggccggcggaagcgaatcggcagaaaatggtgacgttccaggtgtcgcgagtggagaccgcgcccttcgatggccagaagcccggcacctccggcctccgcaagaaggtgaaagtttttgtccagccccattacttgcaaaattttgtgcaatcaacattttatgccctttcagctgagaaagtccaaggagctacactcgttgtttctggtgatgggcgttatttctctaaggatgctatccagatcataataaagatgtcagctgcaaatggagtaaggcgtgtctgggtaggtcagaatggattactttccactcctgccgtgtcagctgtgatccgtgaaagagttgggcatgatggatccaaggctacaggagcatttattctga

SEQ ID NO: 493 - DNA, 424 bp, Eucalyptus grandis
  misc_feature (1)...(424): n = A,T,C or G
gagaacttattgttaaagataatagagagatcaagatgcgcctctcatgaagtcacccatatgaaacaaacatgtgaaaggtctagcagggttgccaactgtttagagaaatctctcatattcgctgagtctgctcttcctgtcatttagttagcaagcccatcatgtgatgaccgtgggagcagatcggccagtaaatccctccatcttggagagcttgagtgcgacattcaccagaggagctaaagcttcttgagaatctctcccagttttcaagggatccttctcatattgctcaatgtaaagacgaatggttgccccttctgagccggttcccgagagacggaaaatnaggcgcgacccatcttcaaacnaataacgaataccctggtgcttcgatatggaaccatcaacaggatctttg

SEQ ID NO: 494 - DNA, 257 bp, Eucalyptus grandis
gttctttgttactccatcagattctgttgctattattgctgcaaatgctgttgaagcaataccctacttctccggaggcttaaagggagttgccaggagcatgccaacatcagctgccttggatgttgttgctaaacatttaaatttgaagttttttgaggttccaacgggctggaaattctttggtaacttaatggatgctggattatgttcagtttgtggggaagaaagtttcggaactgggtcagaccatatac

SEQ ID NO: 495 - DNA, 483 bp, Eucalyptus grandis
ggtaaaaatcttactgtggcgaaagcgggatctatgtgatcacggttggggcagatcgcccggtaaattcctgcatttttgaaagcttgagagcaacttccacaagaggagccaatgcttcctgagaatctctcccagtttttgctggatccttctcatactgctctatgtaaagacgaatggttgcaccttccgagcctgttcccgagaggcgaaaaacaagtcgtgacccatcttcgaacaaatatcgaataccctggtgcttagaaatggaaccatcaacaggatccttatattcaaattcatcagcatgaacaacatttgatgcatcaggacaaacccccttgacaatctggttgacttcagagagagaagattgcagttggaccaagtatcccatcagttcctttgctgctcctgaatcaacattctcataatcatatctggtataataatgacgaccatatgtcacccaatgctgac

SEQ ID NO: 496 - DNA, 353 bp, Eucalyptus grandis
tgacaatctggttgacttcagagagagaagattgcagttggaccaagtatcccatcagttcctttgctgctcctgaatcaacattctcataatcatatctggtataataatgacgaccatatgtcgcccaatgctgacggacaatgtcctcaacagatacaagcttttctccacttaagttctccttatttttgtaagcgagaatagataaccaagcaagcacagcccatatcccatctttctcacgaatatgatcagagccagttccaaaactttcctctccacaaaccgagataatccagcatccatcaagttaccaaagaatttccaccctgtaggcacctcaaaaaact

SEQ ID NO: 497 - DNA, 442 bp, Eucalyptus grandis
  misc_feature (1)...(442): n = A,T,C or G
gccaaccgcatatttgtagaagagcttggtgcacaagagagctcattattgaactgcacacctaaggaggattttggagggggtcacccagatccaaatttgacatatgcaaaggagctggtggcacggatgggtttgggcaagtcaagtcctcancatgagccccccaaatttggtgctgctgctgatggtgatgctgatcgtaatatggttctcggaaaaaggttctttgttactccatcagattctgttgctattattgctgcaaatgctgttgaagcaataccctacttctccggaggcttaaagggagttgccaggagcatgcaacatcagctgccttggatgttgttgctaaacatttaaatttgaagttttttgaggttccaacgggctggaaattctttggtaacttaatggatgctggattatgttcagtttg

SEQ ID NO: 498 - DNA, 364 bp, Eucalyptus grandis
gccaaccgcatatttgtagaagagcttggtgcacaagagagctcattattgaactgcacacctaaggaggattttggagggggtcacccagatccaaatttgacatatgcaaaggagctggtggcacggatgggtttgggcaagtcaagtcctcagcatgagccaccagaatttggtgctgctgctgatggtgatgctgatcgtaatatggttctcggaaaaaggttctttgttactccatcagattctgttgctattattgctgcaaatgctgttgaagcaataccctacttctccggaggcttaaagggagttgccaggagcatgccaacatcagctgccttggatgttgttgctaaacatt

SEQ ID NO: 499 - DNA, 365 bp, Eucalyptus grandis
ccgtgtcagctgtgatccgtgaaagagttgggcatgatggatccaaggctacaggagcatttattctgacggcaagtcataatcccggtggtccccatgaggattttggaatcaagtataacatggaaaatggtggacctgctcctgaggcgatcactgataagatgtatgaaaatacaaaaacaataaaagaatatctaattgcagaaaatctccctcatgtggatattgctgcaattggtgtcacaagctttacggggccagagggtcaattcgatgttgaggtttttgattcagccagtgactatgttaaattaatgaagtcaatttttgacttccaggcgatccgaaagctgctttcatct

SEQ ID NO: 500 - DNA, 390 bp, Eucalyptus grandis
ggctacaggagcatttattctgacggcaagtcataatcccggtggtccccatgaggattttggaatcaagtataacatggaaaatggtggacctgctcctgaggcgatcactgataagatgtatgaaaatacaaaaacaataaaagaatatctaattgcagaaaatctccctgatgtggatattgctgcaattggtgtcacaagctttacggggccagagggtcaattcgatgttgaggtttttgattcagccagtgactatgttaaattaatgaagtcaatttttgacttccaggcgatccgaaagctgctttcatctccaaattttaccttctgctatgatgctctccatggagttgctggagcatatgccaaccgcatatttgtaga

SEQ ID NO: 501 - DNA, 341 bp, Eucalyptus grandis
ggtaggtcagaatggattactttccactcctgccgtgtcagctgtgatccgtgaaagagttgggcatgatggatccaacgctacaggagcatttattctgacggcaagtcataatcccggtggtccccatgaggattttggaatcaagtataacatggaaaatggtggacctgctcctgaggcgatcactgataagatgtatgaaaatacaaaaacaataaaagaatatctaattgcagaaaatctccctgatgtggatattgctgcaattggtgtcacaagctttacggggccagagggtcaattcgatgttgaggtttttgattcagccagtgactatg

SEQ ID NO: 502 - DNA, 600 bp, Eucalyptus grandis
gctaaaagaaaaaacaaataaataaaaaaagaaataattttgcagacaaaatttgaaaaaactgtcatctcgccttgctcagttccccaccacctttcctggcaccatcatcgacatcctccctgtttctgaaaatggtgacgttccaggtgtcgcgagtggagaccgcgcccttcgatggccagaagcccggcacctccggcctccgcaagaaggtgaaagtttttgtccagccccattacttgcaaaattttgtgcaatcaacattttatgccctttcagctgagaaagtccaaggagctacactcgttgtttctggtgatgggcgttatttctctaaggatgctatccagatcataataaagatgtcagctgcaaatggagtaaggcgtgtctgggtaggtcagaatggattactttccactcctgccgtgtcagctgtgatccgtgaaagagttgggcatgatgtaagctatctttttctctttggtggcatccaattgtataaccctttgactatgcaatcacaatgcagcaatattatctggatatgaagtgctctctaacaaaatacgtacacaatctatcatcagggatcca

SEQ ID NO: 503 - DNA, 360 bp, Eucalyptus grandis
gcaaaactgtttacatgaggggtcggtaaaaatcttactgtggcgaaagcgggatctatgtgatcacggttggggcagatcgcccggtaaattcctgcatttttgaaagcttgagagcaacttccacaagaggagccaatgcttcctgagaatctctcccagtttttgctggatccttctcatactgctctatgtaaagacgaatggttgcaccttccgagcctgttcccgagaggcgaaaaacaagtcgtgacccatcttcgaacaaatatcgaataccctggtgcttagaaatggaaccatcaacaggatccttatattcaaattcatcagcatgaacaacatttgatgcatcaggac

SEQ ID NO: 504 - DNA, 395 bp, Pinus radiata
gttcttggcaagaggttttttgtgactccatcagattctgttgccatcattgcagcaaatgcagttgaagccattccatacttcagctctggattgaaaggtgttgcaagaagcatgccgacatcagctgcacttgatgtagttgcaaaaagtcttaatcttaggtttttcgaggtgcccactggctggaagttttttggaaatttaatggatgctggaatgtgttctgtttgtggtgaagagagtttcggcactggttccgaccatatccgagagaaggatggaatctgggcagttttagcatggctttcaattctagcttacaaaaataaggataaccttgatggcgggaagcttgtcactgtagaggacatagtccgtaaccattgggcttc

SEQ ID NO: 505 - DNA, 477 bp, Pinus radiata
tccatctccactacaaccactatcatgacccgcttcaacatccaagaggtttctaccaagccctacgagggccagaagcctggtacgtccgggctgcgaaagagggtgaaggtgttccagcaagagcactataccgagaacttcgtccaagctatcctcgatgcgatgcctggacctggtgtcaacggctcaaccctcgttgtcggaggtgacggtcgataccactccgagcctaccgtgcaatcgatcctcaagatcgcggccgcaaacggcgtgaagaagctatacattggcaaagacgcaatcctttcgaccccggccgcctcgaacatcattcgccagtacaaggccgatggtggtatcctgctgaccgccagtcacaaccctggtggaccggacaatgactttggtatcaagtacaacatcaacaacggtgggccggccccagagagcgttaccgacaagatcttcgagcgc

SEQ ID NO: 506 - DNA, 436 bp, Pinus radiata
tggaaacagaaccatcaaccggatctttgtattcaaattcatcggcatccacgacaccagaaacatctggcctcacttccttaattaatttgttaacttcggggagagaagactgcagcttaattaaatgtgacatgagctccttggcagcacctgcatcaacattttcatagtcatagcgtgtataatagtggcgaccataagaagcccaatggttacggactatgtcctctacagtgacaagcttcccgccatcaaggttatccttatttttgtaagctagaattgaaagccatgctaaaactgcccagattccatccttctctcggatatggtcggaaccagtgccgaaactctcttcaccacaaacagaacacattccagcatccattaaatttccaaaaaacttccagccagtgggcacctcgaaaaacct

SEQ ID NO: 507 - DNA, 473 bp, Eucalyptus grandis
tgataatgaagggaagattcttagagtgaggttgataatgaaagagggtgtgaagtatttcaacccggtatacctgtttgacgagggctcgaccatctcttggatcccgtgtggaagaaagctcacttgctcttaccccggcatcaagttcacttatggcccggagagttacttcgggcacgaggtgtctgtgttggagatggatgggcaatttgacagactagatgagctcatctatgtggaaagccatttgagcaacctctccacaaaattctatggtgaagtcacccagcagatgctgaagcactccgaattccccggaagcaacaatggcactggtctcttccagaccatagttgggctaaaaatcagagacctctatgagcaaatcacagccagcaaagcagctgcaccattacaaggcactaaagcttaggacttccatatactagttccccctcttctttctcaat

SEQ ID NO: 508 - DNA, 379 bp, Eucalyptus grandis
gctcatcaagcctcccaagatcctggtcattgagggacttcacccaatgttcgaccagcgcgttagggacttgctggacttcagcatatatttggacatcagcaatgaggtcaaatttgcatggaaaatccagagggacatggccgagcgaggacacagtctcgagagcatcaaagctagcattgaagcccgaaagccagattttgaagcctatatagacccacagaagcagtatgcagatgcagtgattgaagtgctgccaacacagctaatccctggtgataatgaagggaagattcttagagtgaggttgataatgaaagagggtgtgaagtatttcaacccggtatacctgtttgacgagggctcgaccatctct

SEQ ID NO: 509 - DNA, 459 bp, Eucalyptus grandis
  misc_feature (1)...(459): n = A,T,C or G
aaagaaaanaaccncagaggagcaggcccttaatcgtaccctccgacacccgactttctctctctacctaaccgttaagactcccgtaaggacacaattcagagcgagaaagaagagagagaaagctcgcgtgcgatagagagagagagagagagagagatgtcgaccgcctcggtttgctcctcgacgctccagtcgcagatcggcggcctcgagctccggcggtcttccctccggcggccgagcaacgtcgctttcaccaggaagatccagacggtggtgaaggcatcttcacgagttgacaaattctccaaaagtgatatcattgtatctccatcaattctatctgctaatttttcgaagctgggagatcaggtgaaagctgtggagttggcaggatgtgattggatccacgttgatgtaatggatggccgttttgttcccaatattacaatcggt

SEQ ID NO: 510 - DNA, 268 bp, Eucalyptus grandis
  misc_feature (1)...(268): n = A,T,C or G
tcaccaggaagatccagacggtggtgaaggcatcttcacgagttgacaaattctccaaaagtgatatcattgtatctccatcaattctatctgctaatttttcgaagctgggagatcagtaatccaggtgaaagctgtggagttggcaggatgtgattggatccangttgatgtaatggatggccgtttngttcccaatattacaatcggtccccttgtggttggtgccctgcgccctgtaacagatcttcctctggatgttcatctg

SEQ ID NO: 511 - DNA, 293 bp, Eucalyptus grandis
  misc_feature (1)...(293): n = A,T,C or G
gnaaaaaagagagatgtcgaccgcctcgctttgctcctcgacgctccagtcgcagattcggcggcctcgagctccggcgatcctcccttcgccggccgagcaacgtcgctttcaccaggaagatccagacggtggtgaaggcatcttcacgagttgacaaattctccaaaagtgatatcattgtatctccatcaattctatctgctaatttttcgaagctgggagatcaggtgaaagctgtggagttggcaggatgtgattggatccacgttgatgtaatggatggccgtttt

SEQ ID NO: 512 - DNA, 423 bp, Eucalyptus grandis
  misc_feature (1)...(423): n = A,T,C or G
gtggagttggcaggatgtgattggatccacgttgatgtaatggatggccgttttgttcccaatattacaatcggtccccttgtggttggtgccctgcgccctgtaacagatcttcctctggatgttcatctgatgattgtggaacctgaacagcgagtaccggatttcatcaaggctggagctgacatagtcagtgtgcattgtgaacaaacttctaccatccacttgcatcgcacggtcaaccaaatcaaaagtctgggagctaaagctggagttgtcctgaaccctgctaccccactaactgctatagaatatgttcttgatgtggttgatctggtgttgatcatgtcggngaaccctggctttggtgggcaaagctttatcgagagccaagtgacgaaaatatcagacttgagaaggatg

SEQ ID NO: 513 - DNA, 508 bp, Pinus radiata
cacagcagcccacgggcccaggacggtcggtgggtttggttagacctgtctgaacaagggccagtgagcaattgagggatcactgaaaatggaagggaacacagagaagggggttatccctaaaattgccccgtcaatgttgtcatcagactttgcgaatctggcttcagaggcgaaatatatgacggaaaatggtgcagattggttgcatatggacatcatggatgggcatttcgttccaaatcttaccattggagcacctgtgattcagagtttgaggaagcatacccaggcattcttggattgtcatcttatggtcacaaaccctcttgattatgtggagccatttgcaaaagctggagcttcagggttcacttttcatgtggaggctgccaaagacaattggcaagatctcatcaaaagaatcagaaatgctggcatgcggcctggagtggcagtgaaacctggaacttctatagaaaactgtttatccctttggtggaaagtg

SEQ ID NO: 514 - DNA, 502 bp, Pinus radiata
cacagcagcccacgggcccaggacggtcggtgggtttggttagacctgtctgaacaagggccagtgagcaattgagggatcactgaaaatggaagggaacacagagaagggggttatccctaaaattgccccgtcaatgttgtcatcagactttgcgaatctggcttcagaggcgaaatatatgacggaaaatggtgcagattggttgcatatggacatcatggatgggcatttcgttccaaatcttaccattggagcacctgtgattcagagtttgaggaagcatacccaggcattcttggattgtcatcttatggtcacaaaccctcttgattatgtggagccatttgcaaaagctggagcttcagggttcacttttcatgtggaggctgccaaagacaattggcaagatctcatcaaaagaatcagaaatgctggcatgcggcctggagtggagtgaaacctggaacttctatagaaactgttatcctttggtggaagt

SEQ ID NO: 515 - DNA, 447 bp, Pinus radiata
tcccgtcacattttttaaatttcattttgttgccttgaggtctagagatcgattcttaggcatgtcaacagcagcgatatcaatatgcgccacggtcgctatggtgggttctcagagcacccattctatgggtgtctgccgtagtccgttctggggaaagaagcataacatggcctttgcaggcccccaattggcgaactcttcaaggaaagttctctctacagtgaaggcatcttcccgagtagacaagttctccaaaactgacatcattgtctctccttctattctttctgcaaattttgcaacattaggtgaccaggtcaaagctgtggagttggcaggttgcgattgggttcatgttgatgtcatggatgggcgttttgtgccaaatattaccattggacctctggtggtggctgcattacgacccgtaacagatttgccact

SEQ ID NO: 516 - DNA, 403 bp, Pinus radiata
tgcatttcgagtttaccaagatatcccgtcacattttttaaatttcattttgttgccttgaggtctagagatcgattcttaggcatgtcaacagcagcgatatcaatatgcgccacggtcgctatggtgggttctcagagcacccattctatgggtgtctgccgtagaccgttctggggaaagaagcataacatggcctttgcaggcccccaattggcgaactcttcaaggaaagttctctctacagtgaaggcatcttcccgagtagacaagttctccaaaactgacatcattgtctctccttctattctttctgcaaattttgcaacattaggtgaccaggtcaaagctgtggagttggcaggttgcgattgggttcatgttgatgtcatggatgggccgt

SEQ ID NO: 517 - DNA, 379 bp, Pinus radiata
attctatgggtgtctgccgtagtccgttctggggaaagaagcataacatggcctttgcaggcccccaattggcgaactcttcaaggaaagttctctctacagtgaaggcatcttcccgagtagacaagttctccaaaactgacatcattgtctctccttctattctttctgcaaattttgcaacattaggtgaccaggtcaaagctgtggagttggcaggttgcgattgggttcatgttgatgtcatggatgggcgttttgtgccaaatattaccattggacctctggtggtggctgcattacgacccgtaacagatttgccactggatgtacatttgatgattgttgaaccggaacaacgtgtaccagattttatcaa

SEQ ID NO: 518 - DNA, 404 bp, Pinus radiata
attctatgggtgtctgccgtagtccgttctggggaaagaagcataacatggcctttgcaggcccccaattggcgaactcttcaaggaaagttctctctacagtgaaggcatcttcccgagtagacaagttctccaaaactgacatcattgtctctccttctattctttctgcaaattttgcaacattaggtgaccaggtcaaagctgtggagttggcaggttgcgattgggttcatgttgatgtcatggatgggcgttttgtgccaaatattaccattggacctctggtggtggctgcattacgacccgtaacagatttgccactggatgtacatttgatgattgttgaaccggaacaacgtgtaccagattttatcaaggctggtgcagacattgttagtgtc

SEQ ID NO: 519 - DNA, 705 bp, Pinus radiata
gaagcaaccatactctcaagttacatcacagcagcccacgggcccaggaaggtcggtgggtttggttagacctgtctgaacaaggtctttggggccagtgagcaattgagggatcactgaaaatggaaggcaacacagagaagggggttatccctaaaattgctccgtcaatgttgtcatcagactttgcgaatctggcttcagaggcgaaatatatgacggaaaatggtgcagattggttgcatatggacatcatggatgggcatttcgttccaaatcttaccattggagcacctgtgattcagagtttgaggaagcatacccaggcattcttggattgtcatcttatggtcacaaaccctcttgattatgtggagccatttgcaaaagctggagcttcagggttcacttttcatgtggaggctgccaaagacaattggcaagatctcatcaaaagaatcagaaatgctggcatgcggcctggagtggcagtgaaacctggaacttctatagaaactgttatcctttggtggaaagtgaagaacctgtggaaatggtgttagtgatgactggtgagcctgcttttggagggcagaaatcatgccagatatgatggataaggtcatgatctacggcggaagtatcctacccttgatattgaggtgatggcggttaagcccatctacaattaaccagcgtctgctg

SEQ ID NO: 520 - DNA, 459 bp, Pinus radiata
attttgaggtctgagtgaattgatttttgagtgtattagggccagtgagcaattgagggatcactgaaaatggaagggaacacagagaagggggttatccctaaaattgccccgtcaatgttgtcatcagactttgcgaatctggcttcagaggcgaaatatatgacggaaaatggtgcagattggttgcatatggacatcatggatgggcatttcgttccaaatcttaccattggagcacctgtgattcagagtttgaggaagcatacccaggcattcttggattgtcatcttatggtcacaaaccctcttgattatgtggagccatttgcaaaagctggagcttcagggttcacttttcatgtggaggctggcaaagacaattggcaagatctcatcaaaagaatcagaaatgctggcatgcggcctggagtggcagtgaaacctggaacttctata

SEQ ID NO: 521 - DNA, 410 bp, Pinus radiata
gggccagtgagcaattgagggatcactgaaaatggaaggcaacacagagaagggggttatccctaaaattgccccgtcaatgttgtcatcagactttgcgaatctggcttcagaggcgaaatatatgacggaaaatggtgcagattggttgcatatggacatcatggatgggcatttcgttccaaatcttaccattggagcacctgtgattcagagtttgaggaagcatacccaggcattcttggattgtcatcttatggtcacaaaccctcttgattatgtggagccatttgcaaaagctggagcttcagggttcacttttcatgtggaggctgccaaagacaattggcaagatctcatcaaaagaatcagaaatgctggcatgcggcctggagtggcagtgaaacctg

SEQ ID NO: 522 - DNA, 286 bp, Eucalyptus grandis
  misc_feature (1)...(286): n = A,T,C or G
atggttcggatggccaatctctgtgtggtgtgcagtcatgctgttaatggtgttgctgagattcacagtgaaatcgtaaagaaggaagtgtttcatgaattctttaagttatggcctgaaaaatttcaaaacaaaacaaatggggtgacaccaagaagatggattcctttctgcaatcctgagttaagtaagattatnactagatggattggcacagaagactggatcctccacacagataaactagctgagttgcgtaagtttgcagataatgaggatcttcaga

SEQ ID NO: 523 - DNA, 443 bp, Eucalyptus grandis
ggtaactctggatatggtcgaggagattattttcttgttggccatgacttccccagttatatggaagcccaagcaagagtagatgatgcctacaaggacagaagaggatggctcaggatgtccatcttaagcactgctggaagtggcaaatttagcagtgaccgaacaattgctcagtacgccaaagaaatctggaacgtagaggggtgctgtgtaccatgaaaagcaatttgaaactagacccgcttttagcttccctcccttccctcctctctccctcttactttatatattgcgatagaggggcaaccatgctctgtaatttatgcttgtaaaaccagattcattacacaaatgcactccgcctaactgcggatgagaaataagcatggatgtaatgatatacagtgtaactttcctttataaaaaaaaaaaaaaaaaaa

SEQ ID NO: 524 - DNA, 265 bp, Eucalyptus grandis
gttaggcatgacgtggttttccctgttagattttttggccacgtggaggttactccaaatggatcccgaaaatgggtgggtggagaggtattgcaagctctagcatatgatgtcccaattcccggatacaagaccaagaacactaatagtcttcgtctctgggaagcaaaagcttcttctcaggatttcaaccttttccaattcaatgatggacagtatgaatcagctggacagttgcactctcgagctgaacaaatttgtgctg

SEQ ID NO: 525 - DNA, 363 bp, Eucalyptus grandis
ggcaattgtccttgtcataatatcccatgcctcgtcccacccaagtccttcatcgtccattaacagacgcattaactctggaatcgcaagagtgggatgagtgtcattcagctgtactgcaactttggttgggaagtcaacccactgccgtgatccttctccacctttcctctccttgaacctgaagattatatcctgcagcgatgcactacagagaaagaattgttgcttcagccgtaaaagttttccactctctgttgcatctccaggatataaaacagcacaaatttgttcagctcgagagtgcaactgtccagctgattcacactgtccatcattgaattggaaaaggttgaaatcctg

SEQ ID NO: 526 - DNA, 344 bp, Eucalyptus grandis
ggcaattgaccttgtcataatatcccatgcctcgtcccacccaagtccttcatcgtccattaacagacgcattaactctggaatcgcaagagtgggatgagtgtcattcagctgtactgcaactttggttgggaagtcaacccactgccgagaaccttctccacctttcctctccttgaacctgaagattatatcctgcagcgatgcactacagagaaagaattgttgcttcagccgtaaaagttttccactctctgttgcatctccaggatataaaacagcacaaatttgttcagctcgagagtgcaactgtccagctgattcacactgtccatcattgaatt

SEQ ID NO: 527 - DNA, 445 bp, Eucalyptus grandis
cacagtacatattgcgggtgacgggtatcagtatagacccaaacagtctatttgacattcaagtgaagcgcattcatgaatacaagagacagctgatgaatattctgggcgtgatctatagatataagaaacttaaggagatgagtcctgaagagaggaaaaagacaacttcacgaacagttatgatcggtggaaaggcatttgcaacatatacgaatgctaaaagaatagtcaagcttgtgactgatgttggtaatgttgtcaacagtgatcctgaggtcaacgactacttgaaggttatatttgttccaaactacaacgtctcagtagcagagattctcattcctggaagtgagctatctcagcacatcagcactgcaggaatggaggcgagtggcacaagcaatatgaaatttgcactgaatggctgcctcattataggaac

SEQ ID NO: 528 - DNA, 529 bp, Eucalyptus grandis
cacagtacatattgcgggtgacgggtatcagtatagacccaaacagtctatttgacattcaagtgaagcgcattcatgaatacaagagacagctgatgaatattctgggcgtgatctatagatataagaaacttaaggagatgagtcctgaagagaggaaaaagacaacttcacgaacagttatgatcggtggaaaggcatttgcaacatatacgaatgctaaaagaatagtcaagcttgtgactgatgttggtaatgttgtcaacagtgatcctgaggtcaacgactacttgaaggttatatttgttccaaactacaacgtctcagtagcagagattctcattcctggaagtgagctatctcagcacatcagcactgcaggaatggaggcgagtggcacaagcaatatgaaatttgcactgaatggctgcctcattataggaacattggatggggccaatgtggaaatcagggaagaaattggggaacagaatttcttcctctttggtgcacagctgatgaggtccct

SEQ ID NO: 529 - DNA, 505 bp, Pinus radiata
gccccgtcggtggttggatcaatgtaaccctgctctctctgacctcatcaccaaaactctgggcggtgacaaatctacatggctcaaggacttgtacaagcttaagggactcctcccttacgcggacaagccagacttccatgccaagtggacggcggcaaagcagaagaacaaggagcgtctggcccattatgcacgtgagacgttgggagtcgagattgataccaagagtttgtttgatgttcagatcaagcgtatccacgaatataaacgccaaaccatgaacatctttggtgtgatctaccggtacctacgtttgaaatcgtcgtcgcccgaggagcgcaagaagattcaggcccgaacccacatcttcggtggcaaggctgctcccggttactacatggccaagctaactattcggttgatcgtcaacgtcgccaaggtgatcaacaacgatccggaagtcaagggcttgatgactattattttctgccctgattactcg

SEQ ID NO: 530 - DNA, 540 bp, Pinus radiata
  misc_feature (1)...(540): n = A,T,C or G
cggaggtgctgttcaatttgtggatcagtatgtgaaaaatgatgttgtgagcattcaaaaggatgtcctanatcacgtggagtatacggttgcgggctcgcggttcgactttagcgattttgaagcgtaccaggccacagcacatagtgtgcgagaccgtttaattgaaagttggaatgatactcatcagtatttcagggaaaataatccaaagcggttgtttttcctatccctcgagtttcttatgggacggtcattatcaaacagcatttacaatcttggcataaaagaccaatatgctgaagctttgaagcaacttggctttgacttggaaacactggtggagcaggaaggagatgcagctcttggtaatggagggcttgctcgactctcagcatgtctgatggactcacttgcaactctggacttaccagcctggggatatggattgcgttatcagtatgggttgtttaggcaggtgataattgatgggtttcagcgtgaacaaccagattattggctgaattttggtaatccttg

SEQ ID NO: 531 - DNA, 398 bp, Eucalyptus grandis
  misc_feature (1)...(398): n = A,T,C or G
cgagtaccgctcctgggtcaaggcccaggcgacgaggagcccgcaggagaggaacacgcggctggagaacatgtgctggaggatttggaacctcgcgcgggaggagaagcagcttgaaggtgaagangnccagagaaaagctaagcgtcgacttgaacgtgaaaggggtcgcagagaagcgactgcggacatgtctgaggacttatctgagggagaaaagggtgatgcagtcagcgatatatcnactcatggtgatagcaacagaggcannttgcctaggataagttctgttgatgcaatggagacatggattggtcaacagaaggggaagaagctttaccttgtattaataagtcttcatggccttatacggggtgaaaacatggagcttggccgtg

SEQ ID NO: 532 - DNA, 225 bp, Eucalyptus grandis
ggagcccgcaggagaggaacacgcgactggagaacatgtgctggaggatttggaacctcgcgcggcagaagaagcagcttgaaggtgaagaagcccagagaaaatctaagcgtcgacttgaacgtgaaaggggtcgcagagaagcgactgcggacatgtctgaggacttatctgagggagaaaagggtgatgcagtcagcgatatatcgactcatggtgatagca

SEQ ID NO: 533 - DNA, 415 bp, Eucalyptus grandis
taccgctcctgggtcaaggcccaggcgacgaggagcccgcaggagaggaacacgcggctggagaacatgtgctggaggatttggaacctcgcgcggcagaagaagcagcttgaaggtgaagaagcccagagaaaagctaagcgtcgacttgaacgtgaaaggggtcgcagagaagcgactgcggacatgtctgaggacttatctgagggagaaaagggtgatgcagtcagcgatatatcgactcatggtgatagcaacagaggcagattgcctaggataagttctgttgatgcaatggagacatggattggtcaacagaaggggaagaagctttaccttgtattaataagtcttcatggccttatacggggtgaaaacatggagcttggcccgtgactcggatactggtggtcag

SEQ ID NO: 534 - DNA, 335 bp, Eucalyptus grandis
ggattccgctgctcttctatctggggctcttaacgtaccaatgctatttactggtcactcacttggtcgagataagttggaacaactcctcaagcaaggccgtctgtccagggatgaaatcaatacgacatacaagataatgcgccgaatagaggcagaagaactgtcccttgattcctctgagatagtgataactagtactaggcaggagattgatgagcaatggcgcttgtatgatgcttttgatccgatattggagaagaagctacgagcaaggataaagcgcaatgtaagctgttatggaaggttcatgccgcgcatggctataatacctc

SEQ ID NO: 535 - DNA, 238 bp, Eucalyptus grandis
cttccctttctctctctagaatccttatctcctgcgacgggaggctcttctctctctagccagcgcccctgcctgcggcggcgatggcggggaacgactggatcaacagctacctcgaggcgatcctcgacgtcggcccggcgctcgacgacaagaaatcgtcgctgctgctgcgggagcgcggccgcttcagccccacccgctacttcgtcgaggaggtcatcaccggcttcgatga

SEQ ID NO: 536 - DNA, 441 bp, Eucalyptus grandis
cttgcttgaggagttgttccaacttatctcgaccaagtgagtgaccagtaaatagcattggtacgtttagagccccagatagaagagcagcggaatccccagcatcagcatagtgaccatggatggcaacaggccacactggttggccaccgccaacttgctctcctaggacttttgacatttgtattacatggctgagtgcaccgtcaacaaattcagggatgtggggccataaaagttcctttggaatatacttatctcttggtccaaaaggtatacggacgatataagcaccactgctctctcccatttcgtccgataaaccttcagaatctcttggagacaacatctccgtgggttcgccataactccaatcaacatctggtgatgatatctgtctagtaagcaagtccactcgataaacgcctggcattgaaccta

SEQ ID NO: 537 - DNA, 389 bp, Eucalyptus grandis
ggtttggatgccgccgagatggtggttacgagcacaaggcaagagatcgaagagcaatggggcttgtacgacgggttcgatctcaagttggagaggaagcttcgggttaggcgacggcgtggggtgagttgctacggacggtacatgccgaggatggtggtcatacctccgggaatggacttcagcaatgtgaaagtagaagattcaactgaaagcgagagcgacctcaaatccttgattagttcagacaagactcctaacaagagacatttaccgcgcatatggtctgaggtgatgagatttttctcgaatcctcataagccgatgatactggcattgtcccgtcctgaccccaagaaaaatgtcacaaccttgctgaaggctttcgg

SEQ ID NO: 538 - DNA, 647 bp, Eucalyptus grandis
ctcctcccctttctctctctagaatccttatctcctgcgaggggaggggctcttctctctctctagccagcgccccctgcctgcggcggcggcgatggcggggaacgactggatcaacagctacctcgaggcgatcctcgacgtcggcccggcgctcgacgacaagaaatcgtcgctgctgctgcgggagcgcggccgcttcagccccacccgctacttcgtcgaggaggtcatcaccggcttcgatgagaccgatctctaccgctcctgggtcaaggcccaggcgacgaggagcccgcaggagaggaacacgcggctggagaacatgtgctggaggatttggaacctcgcgcggcagaagaagcagcttgaaggtgaagaagcccagagaaaagctaagcgtcgacttgaacgtgaaaggggtcgcagagaagcgactgcggacatgtctgaggacttatctgagggagaaaagggtgatgcagtcagcgatatatcgactcatggtgatagcaacagaggcagattgcctaggataagttctgttgatgcaatggagacatggattggtcaacagaaggggaagaagctttaccttgtattaataagtcttcatggccttatacggggtgaaaacatggagcttg

SEQ ID NO: 539 - DNA, 340 bp, Eucalyptus grandis
  misc_feature (1)...(340): n = A,T,C or G
ctttctctctctagaatccttatctcctgcgacgggaggctcttctctctctagccagcgcccctgcctgcggcggcgatggcggggaacgactggatcaacagctacctcgaggcgatcctcgacgtcggcccggcgctcgacgacaagaaatcgtcgctgctgctgcgggagcgcggccgcttcagccccacccgctacttcgtcgaggaggtcatcaccggcttcgatgagaccgatctctaccgctcctgggtcaaggcccaggcgacgaggagcccgcagganaggaacacgcgactggagaacatgtgctggaggatttggaacctcgcgcggc

SEQ ID NO: 540 - DNA, 320 bp, Eucalyptus grandis
ttccctttctctctctagaatccttatctcctgcgacgggaggctcttctctctctagccagcgcccctgcctgcggcggcgatggcggggaacgactggatcaacagctacctcgaggcgatcctcgacgtcggcccggcgctcgacgacaagaaatcgtcgctgctgctgcgggagcgcggccgcttcagccccacccgctacttcgtcgaggaggtcatcaccggcttcgatgagaccgatctctaccgctcctgggtcaaaggtgagtcagatcgagagcgcgcgcgcgggggcggcggaggagacgtctcgttcg

SEQ ID NO: 541 - DNA, 386 bp, Eucalyptus grandis
gtccgtataccttttggaccaagagataagtatattccaaaggaacttttatggccccacatccctgaatttgttgacggtgcactcagccatgtaatacaaatgtcaaaagtcctaggagagcaagttggcggtggccaaccagtgtggcctgttgccatccatggtcactatgctgatgctggggattccgctgctcttctatctggggctcttaacgtaccaatgctatttactggtcactcacttggtcgagataagttggaacaactcctcaagcaaggccgtctgtccagggatgaaatcaatacgacatacaagataatgcgccgaatagaggcagaagaactgtcccttgattctctgagatagtgataactatacta

SEQ ID NO: 542 - DNA, 326 bp, Eucalyptus grandis
ttccctttctctctctagaatccttatctcctgcgacgggaggctcttctctctctagccagcgcccctgcctgcggcggcgatggcggggaacgactggatcaacagctacctcgaggcgatcctcgacgtcggcccggcgctcgacgacaagaaatcgtcgctgctgctgcgggagcgcggccgcttcagccccacccgctacttcgtcgaggaggtcatcaccggcttcgatgagaccgatctctaccgctcctgggtcaaggtgagtcagatcgagagcgcgcgcgcgggggcggcggaggagacgtctcgttcggttgatt

SEQ ID NO: 543 - DNA, 363 bp, Eucalyptus grandis
ccctctcctcccctttctctctctagaatccttatctcctgcgaggggaggggctcttctctctctctagccagcgccccctgcctgcggcggcggcgatggcggggaacgactggatcaacagctacctcgaggcgatcctcgacgtcggcccggcgctcgacgacaagaaatcgtcgctgctgctgcgggagcgcggccgcttcagccccacccgctacttcgtcgaggaggtcatcaccggcttcgatgagaccgatctctaccgctcctgggtcaaggcccaggcgacgaggagcccgcaggagaggaacacgcggctggagaacatgtgctggaggatttggaacctcgcgcggcaga

SEQ ID NO: 544 - DNA, 558 bp, Eucalyptus grandis
ccttccctttctctctctagaatccttatctcctgcgacgggaggctcttctctctctagccagcgcccctgcctgcggcggcgatggcggggaacgactggatcaacagctacctcgaggcgatcctcgacgtcggcccggcgctcgacgacaagaaatcgtcgctgctgctgcgggagcgcggccgcttcagcccacccgctacttcgtcgaggaggtcatcaccggcttcgatgagaccgatctctaccgctcctgggtcaaggcccatgcgacgaggagcccgcaggagaggaacacgcgactggagaacatgtgctggaggatttggaacctcgcgcggcagaagaagcagcttgaaggtgaagaagcccagagaaaatctaagcgtcgacttgaacgtgaaaggggtcgcagagaagcgactgcggacatgtctgaggacttatctgagggagaaaagggtgatgcagtcagcgatatatcgactcatggtgatagcaacagaggcagattgcctaggataagttctgttgatgcaatggagacatgggttg

SEQ ID NO: 545 - DNA, 414 bp, Eucalyptus grandis
  misc_feature (1)...(414): n = A,T,C or G
cctgtctctctctgtttctctctgtttttntctgtctntctgtctctgtgtctctgtgtgcggtgggaaatggcggggaacgagtgggtgaacagctacctggaggccatcctcgacgtcggcccggcgctcgacgaccccaagtcgtcgtcgctgctgctgagggagaggggccgcttcagccccacccgctacttcgtcgagcaggtcatcaccggcttcgacgagaccgatctccaccgctcctggctccgggccgcggngacccggancccgcaggagaggaacaccaggttggagaacatgtgctggaggatatggaatctcgctcgcaagaagaagcngcttgagggagaggaagctcaacgcatcgctaagcggcgtcttgaacatgaaagaggtcgtagagaggca

SEQ ID NO: 546 - DNA, 289 bp, Eucalyptus grandis
ccttccctttctctctctagaatccttatctcctgcgacgggaggctcttctctctctagccagcgcccctgcctgcggcggcgatggcggggaacgactggatcaacagctacctcgaggcgatcctcgacgtcggcccggcgctcgacgacaagaaatcgtcgctgctgctgcgggagcgcggccgcttcagcccacccgctacttcgtcgaggaggtcatcaccggcttcgatgagaccgatctctaccgctcctgggtcaaggcccaggcgacgaggagcccgca

SEQ ID NO: 547 - DNA, 227 bp, Eucalyptus grandis
  misc_feature (1)...(227): n = A,T,C or G
acatgtctgaggacttatctgagggagaaaagggtgatgcagtcagcgatntatcgactcatggtgatagcaacagaggcagattgcctaggataagttctgttgatgcaatggagacatgggttggtcaacagnngggaagaagctttaccttgtattaataagtcttcatggcctatacggggtgaaaacatggagcttggccgagactcggatactggtggtca

SEQ ID NO: 548 - DNA, 415 bp, Pinus radiata
gtcggttcatggccccgaatggtggttatacctcccggtatggacttcagcaatgtagttgttgcagaccaagagcctgcagaagctgatggagaccttgcagctttgatcaatggtgatggtaacttatctcctaaagccttgccacccatatggtccgaggtgatgcgttttttcacaaatcgacacaaacccatgattcttgctttatcacgacctgatcccaaaaaaaaatctcactactctagtcaaagcgtttggagaatgccggccattaaaagagctggcaaatttgacactagtaatgggaaacagagatgatatagatgaaatgtcgggaggtaatgcagctgttctaacaacggttttgaagctgatagataagtatgacttgtatgggcaagttgcttatcca

SEQ ID NO: 549 - DNA, 299 bp, Pinus radiata
caaaggctggccaagaggcgtatcgagcgcgagcaagggcggagagatgccacagaggacatgtcggaggatttgtccgagggtgaaaaggctgatgttgctactcccagggcaacgcccaagcgcgctttttcgcggaacttctccgacttgcaagtctggtctgatgacaataagggaaagcgcctgtacattgtgctcataagcttgcatggtttagtaagaggtgaaaacatggaattgggtagagattctgatacaggcgggcaggttaaatacgttgtagaacttgcaagagc

SEQ ID NO: 550 - DNA, 304 bp, Pinus radiata
atagaaagctcagacagcgagcaaagcgtggtgtccattcttatggtcgttacatgcctcgaatgtcggttatacctcctggaatggacttcagcaatgttgtagtgcatgacgagaattcagataatgatttagataatgattctgttcaattgcccgagtctcctttatggggtgagatcccacggtttttgaacaatccctcgaagcccattattttggctcttgctcgacctgatcccaagaagaacatggccactttagtcaaggcttttggtgaatgtatcaaattgaggaagctggc

SEQ ID NO: 551 - DNA, 464 bp, Pinus radiata
gagagccaactgaaatgctgacttctgatcaggatgatgacattctagagagtggaggggcatacatagttcgaattccctgtggatgcaaagaaaagtatattcagaaagaattgtttggccatacattccagagtttgtagatggagcactgggtcatattcttaatatttccaaagcattgggagatctgattggagaagacacacctgtatggcctcatgtaatccatggccactatgcagatgcaggggatgctgcttgccttctttctggtgctctgaacgttccaatggttttgacaggccattctctaggccgaaataaactagaacaattattgaaacaaggattgcattccaaggaagatatcaatgcaacgtacaagatcatgcgtaggattgaagctgaagaattgtgccttgattccgctgagcttgtggtgacaagtaccaaggcaagaa

SEQ ID NO: 552 - DNA, 312 bp, Eucalyptus grandis
  misc_feature (1)...(312): n = A,T,C or G
acttcagaggatctatgaaaggtacacctggaagatttattcagagaggctgatgacactggcaggggtttatggcttctggaagtatgtttcaaagctcgagaggcgtgagacccggcgatatcttgagatgttctacattcttaaattccgggaattggtgaaaactgttcccntggcagncgacgagccccattaatctggtggcatcaccgaactcaagggggttgtcacccgggggcattcgccatgtaaatatttccgtctttcactccaatgcanaagcatgagcattccgtattgaataattga

SEQ ID NO: 553 - DNA, 442 bp, Eucalyptus grandis
  misc_feature (1)...(442): n = A,T,C or G
cgggcacgtaatggagagctttaccgctatatagcagacacaaaaggtgtttttgttcagccggctttttatgaagcttttggacttacagttgttgaggctatgacgtgcggccttccaacatttgccacttgtcatggtggtccggcagagaaattgaacatggggtttnaggatatcatattgatccatatcatcctgaccaggctgctaccctactggcagatttctttgagcaaagtaaaagggaccccaatcactggactaaaatctctgctgctggacttcagaggatctatgaaaggtacacctggaagatttattcagagaggctgatgacactggcaggggtttatggcttctggaagtatgtttcaaagctcgagaggcgtgagacccggcgaatcttgagatgttttacattcttaaattccgggaattg

SEQ ID NO: 554 - DNA, 421 bp, Eucalyptus grandis
aaaagatgcatgaactgatgaaggaatacaatttggatggtcaatttcgttggatggcggcccaaacaaatcgggcacgtaatggagagctttaccgctatatagcagacacaaaaggtgtttttgttcagccggctttttatgaagcttttggacttacagttgttgaggctatgacgtgcggccttccaacatttgccacttgtcatggtggtccggcagagataattgaacatggtgtatcaggatatcatattgatccatatcatcctgaccaggctgctaccctactggcagatttctttgagcaaagtaaaaaggaccccaatcactggactaaaatctctgctgctggacttcagaggatctatgaaaggtacacctggaagatttattcagagaggctgatgacactggcagg

SEQ ID NO: 555 - DNA, 448 bp, Pinus radiata
  misc_feature (1)...(448): n = A,T,C or G
tgcattgcgtcgatgctgnaatttaactcgaaacgatgattttgctcctaaatttggaggaccaaaaagccattctaaagcaagatggtgtcttacttgtgttcaagtgtgtcaacaggactgaacagaagttcttcaatagcgtcatggaaatgtgtaagccgactctctctttctttgtaagggaaatatatactcatatcagctccaggagccacaatgttgaatttgggatcgaaaacatcaatgcctgagactacacggtattgcccaggcagtgtaaaagcaccgtggctttcatactgcccaactgtgtcctcactgcatccaccagaatatggnaaactataaacatttcagccaactacaatgttaaaatgaaacttattcaatgctaagacaaataaaatgagggctgaagcttaggccctttgcttcaaaaaaaaaa

SEQ ID NO: 556 - DNA, 348 bp, Eucalyptus grandis
cctgtacgacgaggtcatgaggtacaaccccaagagcccctactggttcaaccgcgaccggttcgtgctgtcggccgggcacggttgcatgctgcagtacgcccttatgcatctcgctgggtatgacagcgtccaggaggaagacttgaaaggcttccggcagtggggaagcaagacccctggccatccggagaactttgagacaaccggtatcgaagttacaacaggtccactcgggcaaggaattgccaatgctgttggtttggcactcgtagagaagcatttggctgctcgcttcaataaaccggacagtgaaatagttgaccactacacatatgtcatccttgg

SEQ ID NO: 557 - DNA, 369 bp, Eucalyptus grandis
cctgtaacgacgaggtcatgaggtacaaccccaagagcccctactggttcaaccgcgaccggttcgtgctgtcggccgggcacggttgcatgctgcagtacgcccttatgcatctcgctgggtatgacagcgtccaggaggaagacttgaaaggcttccggcagtggggaagcaagacccctggccatccggagaactttgagacaaccggtatcgaagttacaacaggtccactcgggcaaggaattgccaatgctgttggtttggcactcgtagagaagcatttggctgctcgcttcaataaaccggacagtgaaatagttgaccactacacatatgtatccttggagatggttgccagatggaggg

SEQ ID NO: 558 - DNA, 470 bp, Eucalyptus grandis
cgggcaaggaattgccaatgctgttggtttggcactcgtagaagcatttggctgctcgcttcaataaaccggacagtgaaatagttgaccactacacatatgtcatccttggagatggttgccagatggagggtatttccaatgaagcttgttcacttgctggtcactggggacttggaaagttgattgctttctatgacgacaaccacatctctatcgatggtgatacggaaattgcattcaccgagagtgttgacacccgtttcgagggtcttgggtggcatgtcatatgggtgaaaaacggaaacactggctatgatgagatacgtgctgctattaaggaagcgaaggctgtcaaggataagcctacattaattaaggtgactaccaccattggctacggttcacctacaaggacaactcatatagtgtgcatgggagcgcactgggtgccaaggaagtcgatgcac

SEQ ID NO: 559 - DNA, 356 bp, Eucalyptus grandis
gtgaacactggttatgatgaaattcgtgctgccatcaaagaagcaaaggctgttaaagacaagcctactttgattaaggtaactacgaccataggttatggttcacctaacaagtccaacagctacagtgtgcatggtagtgcactgggcgccaaggaagttgatgcaactaggaataaccttggttggccatatgagcctttccatgtgcctgaggatgttaaaaagcactggagtcgccatactcctgttggtgctgccgttgaagctgaatggaatgcaaaatttgctgaatatgagaagaaatacaaggatgaagctgcagtgctgaaatctatcattaagggcgaactacc

SEQ ID NO: 560 - DNA, 447 bp, Eucalyptus grandis
  misc_feature (1)...(447): n = A,T,C or G
gttgccagatggagggtatttccaatgaagcttgttcacttgctggtcactggggacttggaaagttgattgctttctatgacgacaaccacatctctatcgatggcgatacggaaattgcattcaccgagagtgttgacacccgtttcgagggtcttggttggcatgtcatatgggntgaaaaacggaaacactggctatgatgaaatacgtgctgctattaaggaagcgaaggctgtcaaggataagcctacattaattaaggtgactaccaccattggctacggttcacctaacaaggccaactcatatagtgtgcatgggagcgcactgggtgccaaggaagttgatgcaacaaggaagaaccttggttggccatatgaacctttccatgtgcctgaggatgtcaaagcgcactggagtcgccatgtccctgctggcgctgct

SEQ ID NO: 561 - DNA, 398 bp, Eucalyptus grandis
  misc_feature (1)...(398): n = A,T,C or G
tttgattaaggtaactacgaccataggttatggttcacctaacaagtccaacagctacagtgtgcatggtagtgcactgggcgccaaggaagttgatgcaactaggaataaccttggttggccatatgagcctttccatgtgcctgaggatgttaaaaagcactggagtcgccatactcctgttggtgctgctgttgaagctgaatggaatgcaaaatttgctgaatatgagaagaaatacaaggatgaagctgcagtgctgaaatctatcattaagggtgaactacctgctggttgggagaaagccctgccgacgtacaccccagagattccagcagatgctaccagaaacctctctnaacaatgcctcaatgcccttgtggatgtggtgcctggtc

SEQ ID NO: 562 - DNA, 406 bp, Eucalyptus grandis
gacacctgggcatcctgagaacttcgagacgcccggtattgaagttacgacaggtccacttggccaaggaatcgccaatgctgttggtttggctcttgccgagaaacatttggctgctcgtttcaacaaaccggacaatgaaattgtcgaccactacacatatgccgttcttggagatggatgtcaaatggaaggcattgcgaatgaagcttgttccctcgctgggcactggggacttgggaagctgattgccttttatgatgacaaccacatctccattgatggtaacacagagattgcattcaccgagaatgttgagaaacgttttgagggtctgggttggcatgttatatgggtgaaaaatggtaacactggttatgatgaaattcgtgctgccatcaaagaa

SEQ ID NO: 563 - DNA, 413 bp, Eucalyptus grandis
  misc_feature (1)...(413): n = A,T,C or G
atggaatgccaagtttgccgagtatgagaagaagtacaaggaagaagctgcagaactgaagtccattttcaagggtgaactgcctgctggttgggaaaaagcacttccgacgtatactcctgagagtcctgctgatgccaccaggaatctctctcagcaatgcctgaatgccctcgctaaagtgctgcctggtcttcttggtggcagtgctgatcttgcttcttccaacatgacactgcttaagatgttcggtgatttccaaaagggcaccccggaggaacgcaatgtcaggttcggtgttagagagcatggaatgggagctatttgcaacgggattgccctgcacagccctggtctcattccatactgcgccacgttctttgtcttcactgactacatganggctgcgatga

SEQ ID NO: 564 - DNA, 398 bp, Eucalyptus grandis
gccatactcctgttggtgctgccgttgaagctgaatggaatgcaaaatttgctgaatatgagaagaaatacaaggatgaagctgcagtgctgaaatctatcattaagggcgaactacctgctggttgggagaaagccctgccgacgtacaccccagagattccagcagacgctaccagaaacctctctcaacaatgcctcaatgcccttgtggatgtggtgcctggtcttcttggtggaagtgcagatcttgcttcctccaacatgactcttctcaaaaagttcggcaatttccaaaaggatacccctgaggaacgtaatgttagatttggtgttagggagcatggaatgggggccatctgcaatgggattgctctccatagcccaggacttatcccg

SEQ ID NO: 565 - DNA, 376 bp, Eucalyptus grandis
gctgaatggaatgccaagtttgccgagtatgagaagaagtacaaggaagaagctgcagaactgaagtccattttcaagggtgaactgcctgctggttgggaaaaagcacttccgacgtatactcctgagagtcctgctgatgccaccaggaatctctctcagcaatgcctgaatgccctcgctaaagtgctgcctggtcttcttggtggcagtgctgatcttgcttcttccaacatgacactgcttaagatgttcggtgatttccaaaagggcaccccggaggaacgcaatgtcaggttcggtgttagagagcatggaatgggagctatttgcaacgggattgccctgcacagccctggtctcattccatactgcg

SEQ ID NO: 566 - DNA, 327 bp, Eucalyptus grandis
gccatactcctgttggtgctgccgttgaagctgaatggaatgcaaaatttgctgaatatgagaagaaatacaaggatgaagctgcagtgctgaaatctatcattaagggcgaactacctgctggttgggagaaagccctgccgacgtacaccccagagattccagcagacgctaccagaaacctctctcaacaatgcctcaatgcccttgtggatgtggtgcctggtcttcttggtggaagtgcagatcttgcttcctccaacatgactcttctcaaaaagttcggcaatttccaaaaggatacccctgaggaacgtaatgttagat

SEQ ID NO: 567 - DNA, 346 bp, Eucalyptus grandis
gacacctgggcatcctgagaacttcgagacgcccggtattgaagttacgacaggtccacttggccaaggaatcgccaatgctgttggtttggctcttgccgagaaacatttggctgctcgtttcaacaaaccggacaatgaaattgtcgaccactacacatatgccgttcttggagatggatgtcaaatggaaggcattgcgaatgaagcttgttccctcgctgggcactggggacttgggaagctgattgccttttatgatgacaaccacatctccattgatggtaacacagagattgcattcaccgagaatgttgagaaacgttttgagggtctgggttggcat

SEQ ID NO: 568 - DNA, 296 bp, Eucalyptus grandis
gacacctgggcatcctgagaacttcgagacgcccggtattgaagttacgacaggtccacttggccaaggaatcgccaatgctgttggtttggctcttgccgagaaacatttggctgctcgtttcaacaaaccggacaatgaaattgtcgaccactacacatatgccgttcttggagatggatgtcaaatggaaggcattgcgaatgaagcttgttccctcgctgggcactggggacttgggaagctgattgccttttatgatgacaaccacatctccattgatggtaacacagaga

SEQ ID NO: 569 - DNA, 359 bp, Eucalyptus grandis
cgagaatgttgagaaacgttttgagggtctgggttggcatgttatatgggtgaaaaatggtaacactggttatgatgaaattcgtgctgccatcaaagaagcaaaggctgttaaagacaagcctactttgattaaggtaactacgaccataggttatggttcacctaacaagtccaacagctacagtgtgcatggtagtgcactgggcgccaaggaagttgatgcaactaggaataaccttggttggccatatgagcctttccatgtgcctgaggatgttaaaaagcactggagtcgccatactcctgttggtgctgctgttgaagctgaatggaatgcaaaatttgctgaatatgaga

SEQ ID NO: 570 - DNA, 394 bp, Eucalyptus grandis
aacgtaatgttagatttggtgttagggagcatggaatgggggccatctgcaatgggattgctctccatagcccaggacttatcccgtactgtgccaccttctttgtcttcacagactacatgagggcagcgatgaggatctctgcgcttgctgaatctggggtcatctacgtcatgacccacgattctattggtcttggagaggatgggcccacgcatcagccagttgagcacttggctagcttccgtgctatgccaaacattctaatgctccgcccagctgatgggaatgaaactgctggtgcatacaaggttgctattgtaaacaggaagagaccttccgtcctcgctctctccaggcaaaagcttcccaaccttcctggaacctccatcga

SEQ ID NO: 571 - DNA, 349 bp, Eucalyptus grandis
gttatggttcacctaacaagtccaacagctacagtgtgcatggtagtgcactgggcgccaaggaagttgatgcaactaggaataaccttggttggccatatgagcctttccatgtgcctgaggatgttaaaaagcactggagtcgccatactcctgttggtgctgctgttgaagctgaatggaatgcaaaatttgctgaatatgagaagaaatacaaggatgaagctgcagtgctgaaatctatcattaagggtgaactacctgctggttgggagaaagccctgccgacgtacaccccagagattccagcagacgctaccagaaacctctctcaacaatgcctcaatgc

SEQ ID NO: 572 - DNA, 388 bp, Eucalyptus grandis
tatcgatggcgatacggaaattgcattcaccgagagtgttgacacccgtttcgagggtcttgggtggcatgtcatatgggtgaaaaacggaaacactggctatgatgagatacgtgctgctattaaggaagcgaaggctgtcaaggataagcctacattaattaaggtgactaccaccattggctacggttcacctaacaaggccaactcatatagtgtgcatgggagcgcactgggtgccaaggaagtcgatgcaacaaggaagaaccttggttggccatatgaacctttccatgtgcctgaggatgtcaaagcgcactggagtcgccatgtccctgctggcgctgctattgaagctgaatggaatgccaagtttgccgagtatgag

SEQ ID NO: 573 - DNA, 342 bp, Eucalyptus grandis
cttttatgatgacaaccacatctccattgatggtaacacagagattgcattcaccgagaatgttgagaaacgttttgagggtctgggttggcatgttatatgggtgaaaaatggtaacactggttatgatgaaattcgtgctgccatcaaagaagcaaaggctgttaaagacaagcctactttgatggcagcacgaccataggttatggttcacctaacaagtccaacagctacagtgtgcatggtaagtgcactgggcgccaaggaagttgatgcaactaggaataaccttggttggccatatgagcctttccatgtgcctgaggatgttaaaaagcactg

SEQ ID NO: 574 - DNA, 526 bp, Pinus radiata
cttggtcaaggaattgccaatgcagttggtttggcacttgctgagaaacatctagcggctagatacaataagccagactccactattgttgatcattacacatattgtattgttggtgatggctgccaaatggagggtatttccaatgaggcctgctcgcttgctggacactggggccttggaaagctgattgctttctatgatgacaaccacatctccatagatggtgacactgagattgcattcacagaggatgttattactcgttttgaaggtctgggatggcacactatctgggtgaagaatggaaatacaggttatgatgaaattcgagctgctattgaggaggccaaatctgtgaaggatagaccaactttaattaagttcactactaccattggctatgggtcaccaaataaggcaaacagttacagtgtacatggaagtgctttgggtgcaaaggaggttgatgcaaccaggcagaatctgggttggcctcatccgccttccacgtaccagaggaggt

SEQ ID NO: 575 - DNA, 295 bp, Pinus radiata
ggaaaatttgagatcctggtgtggtaatcacaatggtaccattggtcaatgaatgtcaatgcagttggtttggcacttgctgagaaacatctagcagctagatacaataagccagactccactattgttgatcattacacatattgtattgttggtgatggctgccaaatggagggtatttccaatgaggcgtgctcgcttgctggacactggggccttggaaagctgattgctttctatgatgacaaccacatctccatagatggtgacactgagattgcattcacagaggtgt

SEQ ID NO: 576 - DNA, 481 bp, Pinus radiata
  misc_feature (1)...(481): n = A,T,C or G
gcaatctccgttttggagtgcgtgaacattccatgggagctatctgcaatgggatagcccttcatggaagtggcctcattccttattgtgctactttctttgttttcacagactacatgagagcagctattagaatctctgcactctctgaagctggtgttatctatgtnatgacccatgattctattggtctcggagaagatgggcccactcatcaaccaatagagcacttggcgagctttagggcaatgcccaatgttttgatgttccgtccagctgatggaaaggagacagctggagcttacaaggttgctgttctcaatagaaagaggccatcaatacttgctctctcccgtcaaaaactcccacatcttgccggttcttcaatagagggtgttgagaagggaggtacattatcagtgacaattcctctggcaacaagcctgatgtcattcttatgggtagtggtctgagcttgaga

SEQ ID NO: 577 - DNA, 407 bp, Pinus radiata
gcaatctccgttttggagtgcgtgaacattccatgggagctatctgcaatgggatagcccttcatggaagtggcctcattccttattgtgctactttctttgttttcacagactacatgagagcagctattagaatctctgcactctctgaagctggtgttatctatgtaatgacccatgattctattggtctcggagaagatgggcccactcatcaaccaatagagcacttggcgagctttagggcaatgcccaatgttttgatgttccgtccagctgatggaaaggagacagctggagcttacaaggttgctgttctcaatagaaagaggccatcaatacttgctctctcccgtcaaaaactcccacatcttgccggttcttcaatagagggtgttgagaagggg

SEQ ID NO: 578 - DNA, 332 bp, Pinus radiata
ctgctcgcttgctggacactggggccttggaaagctgattgctttctatgatgacaaccacatctccatagatggtgacactgagattgcattcacagaggatgttattactcgttttgaaggtctgggatggcacactatctgggtgaagaatggaaatacaggttatgatgaaattcgagctgctattgaggaggccaaatctgtgaaggatagaccaactttaattaagttcactactaccattggctatgggtcaccaaataaggcaaacagttacagtgtacatggaagtgctttgggtgcaaaggaggttgatgcaaccaggcaga

SEQ ID NO: 579 - DNA, 500 bp, Pinus radiata
attccatgggagctatctgcaatgggatagccttcatgggagtggcctcattccttattgtgctactttctttgttttcacagactacatgagagcagctattagaatctctgcactctctgaagctggtgttatctatgtaatgacccatgattctattggtctcggagaagatgggcccactcatcaaccaatagagcacttggcgagctttagggcaatgcccaatgttttgatgttccgtccagctgatggaaaggagacagctggagcttacaaggttgctgttctcaatagaaagaggccatcaatacttgctctctcccgtcaaaaactcccacatcttgccggttcttcaatagagggtgttgagaagggaggctacattatcagtgacaattcctctggcaacaagcctgatgtcattcttatgggtagtggttctgagcttgagattgctgagaaagctgcatctactttgaggaatgaagggaaagctg

SEQ ID NO: 580 - DNA, 465 bp, Pinus radiata
gttggtttggcacttgctgagaaacatctagcggctagatacaataagccagactccactattgttgatcattacacatattgtattgttggtgatggctgccaaatggagggtatttccaatgaggcctgctcgcttgctggacactggggccttggaaagctgattgctttctatgatgacaaccacatctccatagatggtgacactgagattgcattcacagaggatgttattactcgttttgaaggtctgggatggcacactatctgggtgaagaatggaaatacaggttatgatgaaattcgagctgctattgaggaggccaaatctgtgaaggatagaccaactttaattaagttcactactaccattggctatgggtcaccaaataaggcaaacagttacagtgtacatggaagtgctttggtgcaaaggaggttgatgcaaccaggcagaatctgg

SEQ ID NO: 581 - DNA, 494 bp, Pinus radiata
ccggtatatactccggagagtcctgctgatgctactcgaaatctatctcaacaatgtttgaatgcacttgtgagggttcttcccggacttttgggtggaagtgcagaccttgcatcatccaacatgacattattaaaaatgtttggtgacttccagaaggatacccctgctgagcgcaatctccgttttggagtgcgtgaacattccatgggagctatctgcaatgggatagcccttcatggaagtggcctcattccttattgtgctactttctttgttttcacagactacatgagagcagctattagaatctctgcactctctgaagctggtgttatctatgtaatgacccatgattctattggtctcggagaagatgggcccactcatcaaccaatagagcacttggcgagctttagggcaatgcccaatgttttgatgttccgtccagctgatggaaaggagacagctggagcttacaaggtgctgttctc

SEQ ID NO: 582 - DNA, 505 bp, Pinus radiata
cagaaggatacccctgctgagcgcaatctccgttttggagtgcgtgaacattccatgggagctatctgcaatgggatagcccttcatggaagtggcctcattccttattgtgctactttctttgttttcacagactacatgagagcagctattagaatctctgcactctctgaagctggtgttatctatgtaatgacccatgattctattggtctcggagaagatgggcccactcatcaaccaatagagcacttggcgagctttagggcaatgcccaatgttttgatgttccgtccagctgatggaaaggagacagctggagcttacaaggttgctgttctcaatagaaagaggccatcaatacttgctctctcccgcaaaaactcccacatcttgccggttcttcaatagagggtgttgagaagggaggctacattatcagtgacaattcctctggcaacaagcctgatgtcattcttatgggtagtggttctgagcttgagat

SEQ ID NO: 583 - DNA, 399 bp, Pinus radiata
cagaaggatacccctgctgagcgcaatctccgttttggagtgcgtgaacattccatgggagctatctgcaatgggatagcccttcatggaagtggcctcattccttattgtgctactttctttgttttcacagactacatgagagcagctattagaatctctgcactctctgaagctggtgttatctatgtaatgacccatgattctattggtctcggagaagatgggcccactcatcaaccaatagagcacttggcgagctttagggcaatgcccaatgttttgatgttccgtccagctgatggaaaggagacagctggagcttacaaggttgctgttctcaatagaaagaggccatcaatacttgctctcttccgtcaaaaactcccacatcttgcc

SEQ ID NO: 584 - DNA, 472 bp, Pinus radiata
aaatggagggtatttccaatgaggcctgctcgcttgctggacactggggccttggaaagctgattgctttctatgatgacaaccacatctccatagatggtgacactgagattgcattcacagaggatgttattactcgttttgaaggtctgggatggcacactatctgggtgaagaatggaaatacaggttatgatgaaattcgagctgctattgaggaggccaaatctgtgaaggatagaccaactttaattaagttcactactaccattggctatgggtcaccaaataaggcaaacagttacagtgtacatggaagtgctttgggtgcaaaggaggttgatgcaaccaggcagaatctgggttggcctcatccgcctttccacgtaccagaggaggttaagagtcactggagtaggcatgtgccaaagggtgcagcgtttgaagcaaagtggtcatctaaatttgccga

SEQ ID NO: 585 - DNA, 531 bp, Pinus radiata
aaaacattgggcattgccctaaagctcgccaagtgctctattggttgatgagtgggcccatcttctccgagaccaatagaatcatgggtcattacatagataacaccagcttcagagagtgcagagattctaatagctgctctcatgtagtctgtgaaaacaaagaaagtagcacaataaggaatgaggccacttccatgaagggctatcccattgcagatagctcccatggaatgttcacgcactccaaaacggagattgcgctcagcaggggtatccttctggaagtcaccaaacatttttaataatgtcatgttggatgatgcaaggtctgcacttccacccaaaagtccgggaagaaccctcacaagtgcattcaaacattgttgagatagatttcgagtagcatcagcaggactctccggagtatataccggcagagccttatcccacccttcaggcaatttaccactaattagtgccttgaactcagcagcctcctcgggatatttcttctcatgttcggcaaat

SEQ ID NO: 586 - DNA, 385 bp, Pinus radiata
ggcttccgtcagtgggggagcaaaacgccaggacatcctgaaaattttgagactcctggtgtggaagtcacaactggaccacttggtcaaggaattgccaatgcagttggtttggcacttgctgagaaacatctagcggctagatacaataagccagactccactattgttgatcattacacatattgtattgttggtgatggctgccaaatggagggtatttccaatgaggcctgctcgcttgctggacactggggccttggaaagctgattgctttctatgatgacaaccacatctccatagatggtgacactgagattgcattcacagaggatgttattactcgttttgaaggtctgggatggcacactatctgggtgaaga

SEQ ID NO: 587 - DNA, 314 bp, Eucalyptus grandis
  misc_feature (1)...(314): n = A,T,C or G
ggcacaccttgctgccgctgccgggaccggtcgttattcccggtatccgtttcagggaggtgtattactgggactcttactgggtcatcaggggcttgttagcttctaagatggatgtgacggcaaaggcgattgtcaacaatctcatctacctcctanacacatatggccatgtcctaaatggtgcgagggtctactacacgaaccggagccaacctccccttctgagtgcaatgattcgtgccatctatgaaaagacacatgacaaggaatttgtcgtgaagtctctccctgctcttctgaaagagcatgat

SEQ ID NO: 588 - DNA, 479 bp, Eucalyptus grandis
gttaattcaatgtggaagtctctaggcaaacaactagtccctgatgttcttatcaatccacagcgctattccattatcccgcaaaagtatccgtttattgttccaggggaaagatttcatgaattttattattgggattcgtattggatcatcaaaggtcttctcacgagtggaatgaatattactgcgaaaggaattatattaaatgctcttgatctcattaaagaatatggatttattcctaatggtgcgagagtctattacttaaccaggagtcaacccccattactttctgagatggtcagatattattacgattatactcaggatatggaactattaagagaagcagtcccaatcctcgacaaagaatacaaatattggatgaaaacccactcagttaacttgcctggaggatacgctcttaatcgatttttctccgatagtgataaacctcgtcctgaatcttacagagaaga

SEQ ID NO: 589 - DNA, 362 bp, Eucalyptus grandis
aagacacatgacaaggaatttgtcgtgaagtctctccctgctcttctgaaagagcatgaattttggacatcaggtcttcatcagatcaccgtccaggaccgtgactgtagtcataatttgagtcgttattacgcaatgtgggataaacccaggcccgaatcttcaacaatcgacaaggagtctgcttcaaatatatcaagcacttctgaaaagcagaagttctatcgggaagtagcttcgacagctgaatctggatgggactttagtaccagatggatgaggaatcctgaggatattactacgttggcaacaacatcaattttaccggttgatttgaacatatacatactaaggatggaact

SEQ ID NO: 590 - DNA, 190 bp, Pinus radiata
ggacagttactggataatcaggggtcttcttgccagtaaaatgtatgaaacagcaaaagggattgtcaacaatcttgtttcacttatacataaatatggatttgtcctaaatggtgcacggacttactatacgaacagaagtcaacctcctctcctaagtgccatggtacgggccatttacatgaaaaca

SEQ ID NO: 591 - DNA, 301 bp, Pinus radiata
ggacagttactggataatcaggggtcttcttgccagtaaaatgtatgaaacagcaaaagggattgtcaacaatcttgtttcacttatacataaatatggatttgtcctaaatggtgcacggacttactatacgaacagaagtcaacctcctctcctaagtgccatggtacgggccatttacatgaaaacaggggatattgatctattaaaaatggcattcccaactttgttacaggaacacagattttggaactcaggaatccataaagttatagtacgggatgcgcatggtgctgaacac

SEQ ID NO: 592 - DNA, 468 bp, Eucalyptus grandis
cgggcttcctcctaagccgccttcccgttcgggggtcgtcggcggcggcatggcggcgcagccagcgtcctcgtcaccggcggctgcgggtacattgggagccacaccgtgctccagctcctgctcggcggcatccgggccaccgtcgtcgacaacctggacaactcctcggaaatcgccgtccggagagtcagggagctcgccggcgagtacggccctaacctcgacttccacaagatggaccttcgcgacagaccagccctcgaggaactattcgcctcgacaaagtttgatgctgtcatacactttgctggattgaaagcagtcggcgaaagtgtacagaaaccgctgctttattatgataacaatcttattgggacaattactttactagaagtgatggcttcccatgaatgtaaaaagcttgttttctcgtcatctgcacagtttatggctggcctaaggagg

SEQ ID NO: 593 - DNA, 601 bp, Eucalyptus grandis
cgggcttcctcctagccgccttcccgttcgggggtcgtcggcggcggcatggcggcgcagccagcgtcctcgtcaccggcggctgcgggtacattgggagccacaccgtgctccagctcctgctcggcggcatccgggccaccgtcgtcgacaacctggacaactcctcggaaatcgccgtccggagagtcaggggagctcgccggcgagtacggccctaacctcgacttccacaagatggaccttcgcgacagaccagccctcgaggaactattcgcctcgacaaagtttgatgctgtcatacactttgctggattgaaagcagtcggcgaaagtgtacagaaaccgctgctttattatgataacaatcttattgggacaattactttactagaagtgatggcttcccatgaatgtaaaaagcttgttttctcgtcatctgctacagtttatggctggcctaaggaggtcccatgcacggaggagtttcccctttgtgctacgaatccatatggacgaaccaagctaattatcgaagatatttgtcgtgatgctaccgagcggattctgagtggaaatcatattgctgagatacttcaat

SEQ ID NO: 594 - DNA, 239 bp, Eucalyptus grandis
  misc_feature (1)...(239): n = A,T,C or G
gattacatccatgtggttgacttagcagatggacatatagcagcattacgcaaactcgatgaatctaatgtcggttgtgaagtgtacaacttaggaacaggtaaaggaacgtcagtnttggagatggttgctgcatttgagaaggcatctggaaaggnaattcctcttgtaatggctggaagaagacctggcgatgcggaaattgtgtatgcttcgacagagaaagctgagcgcgaatt

SEQ ID NO: 595 - DNA, 388 bp, Eucalyptus grandis
ctcctctctctctctctatctctaggcgcacatggcgaagagcgtgctcgtgacgggcggcgccggctacatcggcagccacacggtgctccagctcctcctcggcggccaccgcgtcgtcgtcgtcgacaacctcgacaactcctcccccgccgccctcgaccgggtccgcgacctcgccggcgagcgcggccccaacctctccttccacgaggttgacctccgagacaaaccggcgctggagaaattgttctcctcgaccaaatttgatgctgtcatacactttgctggattgaaagcagtaggtgaaagtgtgcagaagccgctgctttatttcaacaataacctcaatgggaccatcatcttgctggaagtcatggctgctcat

SEQ ID NO: 596 - DNA, 454 bp, Eucalyptus grandis
  misc_feature (1)...(454): n = A,T,C or G
gtttaccgggcagattctgaatggaagataatgttgttgagatacttcaatccagttggtgcacatcctagtggctccattggtgaggatcccagggggatcccaaacaatctaatgccatttgtgcagcaagttgctgtcggaagacgacctgctttgacagtttatngnaacagactattcaacgaaggatggtactggggttcgtgattacatccatgttgttgatctagccgatggacacattgctgcattgcaaaagcttgaagaacccggcatagggtgtgaggtgtataatctgggaacagggaagggaacttcagtcttggagatggttgctgcatttgagaaggcatctggaaagaaaattccactcgttaaggctgggcgccgaccaggttgatgctgaaattgtatatgcatcaacagaaaaggctgaacacgaattgaactg

SEQ ID NO: 597 - DNA, 443 bp, Eucalyptus grandis
tcgtgacgggcggcgccggctacatcggcagccacacggtgctccagctcctcctcggcggccaccgcgtcgtcgtcgtcgacaacctcgacaactcctcccccgccgccctcgaccgggtccgcgacctcgccggcgagcgcggccccaacctctccttccacgaggttgacctccgagacaaaccggcgctggagaaattgttctcctcgaccaaatttgatgctgtcatacactttgctggattgaaagcagtaggtgaaagtgtgcagaagccgctgctttatttcaacaataacctcaatgggaccatcatcttgctggaagtcatggctgctcatggatgtaagaagcttgtgttttcctcatctgctactgtttacggttggccaaaggaggtcccatgtacagaggacttccctgtttctgccacgaatccatat

SEQ ID NO: 598 - DNA, 268 bp, Eucalyptus grandis
tggcgaagagcgtgctcgtgacgggcggcgccggctacatcggcagccacacggtgctccagctcctcctcggcggccaccgcgtcgtcgtcgtcgacaacctcgacaactcctcccccgccgccctcgaccgggtccgcgacctcgccggcgagcgcggccccagcctctccttccacgaggttgacctccgagacaaaccggcgctggagaaattgttctcctcgaccaaatttgatgctgtcatacactttgctggattgaaagc

SEQ ID NO: 599 - DNA, 437 bp, Eucalyptus grandis
  misc_feature (1)...(437): n = A,T,C or G
ctctctctctatctctaggcgcacatggcgaagagcgtgctcgtgacgggcggcgccggctacatcggcagccacacggtgctccagctcctcctcggcggccaccgcgtcgtcgtcgtcgacaacctcgacaactcctcccccgccgccctcgaccggntcccgnnacctcgccggcgagcgcggccccaacctctccttccacgaggttgacctccgagacaaaccggcgctggagaaattgttctcctcgaccaaatttgatgctgtcatacactttgctggattgaaagcagtaggtgaaagtgtgcagaagccgctgctttatttcaacaataacctcaatgggaccatcatcttgctggaagtcatggctgctcatggatgtaagaagcttgtgttttcctcatctgctactgtttacggttggccaaagg

SEQ ID NO: 600 - DNA, 578 bp, Eucalyptus grandis
gtttaccgggcagattctgaatggaagataatgttgttgagatacttcaatccagttggtgcacatcctagtggctccattggtgaggatcccagggggatcccaaacaatctaatgccatttgtgcagcaagttgctgtcggaagacgacctgctttgacagtttatggaacagactattcaacgaaggatggtactggggttcgtgattacatccatgttgttgatctagccgatggacacattgcttgcattgcaaaagcttgaagaacccggcatagggtgtgaggtgtataatctgggaacagggaagggaacttcagtcttggagatggttgctgcatttgagaaggcatctggaaagaaaattcactcgttaaggctgggcgccgaccaggtgatgctgaaattgtatatgcatcaacagaaaaggctgaacacgaattgaactggaaggccaaatatggcattgaggagatgtgcccgagatcaatggaactgggccagcaagacccttatggctatggatcccccgactcgactgactgatagcttaggattttggcattctcgtatta

SEQ ID NO: 601 - DNA, 160 bp, Eucalyptus grandis
gtgatgtttaccgggcagattctgaatggaagataatgttgttgagatacttcaatccagttggtgcacatcctagtggctccattggtgaggatcccagggggatcccaaacaatctaatgccatttgtacagcaagttgctgtcggaagacgacctgc

SEQ ID NO: 602 - DNA, 381 bp, Eucalyptus grandis
gcaatacctaatacgagaatgccaaaatcctcagctatcagtcagtcgagtcgggggatccatagccataagggttcttgctggcccagttccattgatctcggcacatctcctcaatgccatatttggccttccagttcaattcgtgttcagccttttctgttgatgcatatacaatttcagcatcacctggtcggcgcccagccttaacgagtggaattttctttccagatgccttctcaaatgcagcaaccatctccaagactgaagttcccttccctgttcccagattatacacctcacaccctatgccgggttcttcaagcttttgcaatgcagcaatgtgtccatcggctagatcaacaacatggatgtaatcac

SEQ ID NO: 603 - DNA, 357 bp, Eucalyptus grandis
ctctatctctaggcgcacatggcgaagagcgtgctcgtgacgggcggcgccggctacatcggcagccacacggtgctccagctcctcctcggcggccaccgcgtcgtcgtcgtcgacaacctcgacaactcctcccccgccgccctcgaccgggtccgcgacctcgccggcgagcgcggccccaacctctccttccacgaggttgacctccgagacaaaccggcgctggagaaattgttctcctcgaccaaatttgatgctgtcatacactttgctggattgaaagcagtaggtgaaagtgtgcagaagccgctgctttatttcaacaataacctcaatgggaccatcatcttgctg

SEQ ID NO: 604 - DNA, 315 bp, Eucalyptus grandis
ttgagatacttcaatccagttggtgcacatcctagtggctccattggtgaggatcccagggggatcccaaacaatctaatgccatttgtgcagcaagttgctgttggaagacgacctgctttgacagtttatggaacagactattcaacgaaggatggtactggggttcgtgattacatccatgttgttgatctagccgatggacacattgctgcattgcaaaagcttgaagaacccggcatagggtgtgaggtgtataatctgggaacagggaagggaacttcagtcttggagatggttgctgcatttgagaag

SEQ ID NO: 605 - DNA, 368 bp, Eucalyptus grandis
catgcctgggttgaaggttaaaggaacggactatagcacaccggatggtacttgtgtcagggattatattgatgtcactgatcttgttgatgctcatgtgaaagcccttgaaaaagcaagacccaagaaagtgggaatatacaatgttggcaccggcaaaggtagatcagtgaaggaatttgtggaggcttgcaagaaggcaactggagtggacatcaaagtcgattacctgccgcgcaggcctggtgattatgcagaagtgtatagtgacccgaccaaggtcaagctcgagctaaactggacggcgaaatacactgatcttcaagagagcttgggtattgcatggagatggcaaaaggcacaccgca

SEQ ID NO: 606 - DNA, 545 bp, Eucalyptus grandis
gcgacctcgccggcgagcgcggccccaacctctccttccacgaggttgacctccgagacaaaccggcgctggagaaattgttctcctcgaccaaatttgatgctgtcatacactttgctggattgaaagcagtaggtgaaagtgtgcagaagccgctgctttatttcaacaataacctcaatgggaccatcatcttgctggaagtcatggctgctcatggatgtaagaagcttgtgttttcctcatctgctactgtttacggttggccaaaggaggtcccatgtacagaggacttccctgtttctgccacgaatccatatggacgaaccaagcttttcattgaagaaatatgccgtgatgtttaccgggcagattctgaatggaagataatgttgttgagatacttcaatccagttggtgcacatcctagtggctccattggtgaggatcccagggggatcccaaacaatctaatgccatttgtgcagcaagttgctgtcggaagacgacctgctttgacagtttatggaacagactattcaacg

SEQ ID NO: 607 - DNA, 356 bp, Eucalyptus grandis
tctagttctcgtcccttcctcccttgctcctctctctctctctatctctaggcgcacatggcgaagagcgtgctcgtgacgggcggcgccggctacatcggcagccacacggtgctccagctcctcctcggcggccaccgcgtcgtcgtcgtcgacaacctcgacaactcctcccccgccgccctcgaccgggtccgcgacctcgccggcgagcgcggccccagcctctccttccacgaggttgacctccgagacaaaccggcgctggagaaattgttctcctcgaccaaatttgatgctgtcatacactttgctggattgaaagcagtaggtgaaagtgtgcagaagccgctgct

SEQ ID NO: 608 - DNA, 462 bp, Eucalyptus grandis
cgctactgcaatcccacacgccaaattcgacccttctagttctcgtcccttcctcccttgctcctctctctctctctatctctaggcgcacatggcgaagagcgtgctcgtgacgggcggcgccggctacatcggcagccacacggtgctccagctcctcctcggcggccaccgcgtcgtcgtcgtcgacaacctcgacaactcctcccccgccgccctcgaccgggtccgcgacctcgccggcgagcgcggccccagcctctccttccacgaggttgacctccgagacaaaccggcgctggagaaattgttctcctcgaccaaatttgatgctgtcatacactttgctggattgaaagcagtaggtgaaagtgtgcagaagccgctgctttatttcaacaataacctcaatgggaccatcatcttgctggaagtcatggctgctcatggatgtaagaagct

SEQ ID NO: 609 - DNA, 362 bp, Eucalyptus grandis
tggcgaagagcgtgctcgtgacgggcggcgccggctacatcggcaccacacggtgctccagctcctcctcggcggccaccgcgtcgtcgtcgtcgacaacctcgacaactcctcccccgccgccctcgaccgggtccgcgacctcgccggcgagcgcggccccagcctctccttccacgaggttgacctccgagacaaaccggcgctggagaaattgttctcctcgaccaaatttgatgctgtcatacactttgctggattgaaagcagtaggtgaaagtgtgcagaagccgctgctttatttcaacaataacctcaatgggaccatcatcttgctggaagtcatggctgctcatggatgta

SEQ ID NO: 610 - DNA, 399 bp, Eucalyptus grandis
tggcgaagagcgtgctcgtgacgggcggcgccggctacatcggcagccacacggtgctccagctcctcctcggcggccaccgcgtcgtcgtcgtcgacaacctcgacaactcctcccccgccgccctcgaccgggtccgcgacctcgccggcgagcgcggccccagcctctccttccacgaggttgacctccgagacaaaccggcgctggagaaattgttctcctcgaccaaatttgatgctgtcatacactttgctggattgaaagcagtaggtgaaagtgtgcagaagccgctgctttatttcaacaataacctcaatgggaccatcatcttgctggaagtcatggctgctcatggatgtaagaagcttgtgttttcctcatctgctactgttacgg

SEQ ID NO: 611 - DNA, 363 bp, Eucalyptus grandis
ctctctctctatctctaggcgcacatggcgaagagcgtgctcgtgacgggcggcgccggctacatcggcagccacacggtgctccagctcctcctcggcggccaccgcgtcgtcgtcgtcgacaacctcgacaactcctcccccgccgccctcgaccgggtccgcgacctcgccggcgagcgcggccccaacctctccttccacgaggttgacctccgagacaaaccggcgctggagaaattgttctcctcgaccaaatttgatgctgtcatacactttgctggattgaaagcagtaggtgaaagtgtgcagaagccgctgctttatttcaacaataacctcaatgggaccatcatcttgctg

SEQ ID NO: 612 - DNA, 457 bp, Eucalyptus grandis
ctctctctctatctctaggcgcacatggcgaagagcgtgctcgtgacgggcggcgccggctacatcggcagccacacggtgctccagtcctcctcggcggccaccgcgtcgtcgtcgtcgacaacctcgacaactcctcccccgccgccctcgaccgggtccgcgacctcgccggcgagcgcggccccaacctctccttccacgaggttgacctccgagacaaaccggcgctggagaaattgttctcctcgaccaaatttgatgctgtcatacactttgctggattgaaagcagtaggtgaaagtgtgcagaagccgctgctttatttcaacaataacctcaatgggaccatcatcttgctggaagtcatggctgctcatggatgtaagaagcttgtgttttcctcatctgctactgtttacggttggccaaaggaggtcccatgtacagaggactt

SEQ ID NO: 613 - DNA, 383 bp, Pinus radiata
accaaaaccaaaattggcgctggggtcacaagggcaaccagcggaaggcttcaacaagtgcgttctggtgactggaggcgctggtttcatcggaagccacaccgccctgcagctcctcgaggatggctacgaggtttatatcatcgacaatttagataactctgttgaagaagcagtgaacagagtgagggatttagttgatcagcgcttccgcctaaatcttcacttttttctgggagatctttgcaacaaagagggatgtagagaaggttttttcattggccaaattcgatgctgtgatacattttgctggattgaaggctgttgggagaaagtgtagcaattccattacgtaattaccaaggaaaaaatctagttgggca

SEQ ID NO: 614 - DNA, 517 bp, Pinus radiata
attcggagaatttcgctattgcagaaaccaaaaccaaaattggcgatggggtcacaagggcaaccagaggaaggcttcaacaagtgcgttctggtgactggaggcgctggtttcatcggaagccacaccgccctgcagctcctcgaggatggctacgaggtttatatcatcgacaatttagataactctgttgaagaagcagtccacacagtgagggatttagttgatcagcgcttccgcctaaatcttcacttttttctgggagatctttgcaacaaagaggatgtagagaaggttttttcattggccaaattcgatgctgtgatacattttgctggattgaaggctgttggagaaagtgtagcaattccattacgttattacaagaacaatctagttggcactctgaacctatatgagattatggccaaacatggttgcaaaaagatggttttttcatcatcagctacagtttatgggcaacccaagggggattccctgtggtagaagactttcc

SEQ ID NO: 615 - DNA, 473 bp, Pinus radiata
cattgatattattttctcacaaaaaaaagtccgggttatgtcaagaagatctgctgtttattcctcaccatgcagatcccctgaatcaactaatctagaatcgtcatttgggtatttattgaggcatgttactctttagatttttgaagtttttgggctaatacagagcgatagtgagcatggagtgccaaggaaagaacattctggtcaccggaggagcaggttatgttggcagtcacactactttgcagttgctgctgggtggttacaaggttgttgtaattgataatctggataactcttcagaagaagctattacaagagttgctaagctcgctggcgaatatgggggcaatctcaccttccataagattgatcttctgggtaaaagaagctatggagaaattgttcttatcaacagaatttgatgctgtcattcattttgctggggttaaagctgtcggagagagtgt

SEQ ID NO: 616 - DNA, 323 bp, Pinus radiata
actttctgctaatgaatccatatgggacgcaccaagctcttccttgaagagattagcccgtgatatttataaggcagatccagattggagaataattttgctgaggtacttcaacccagttggagctcacccaagtggccagattggtgaagatccaaagggaattccaaataacctcatgcctttcatccaacaagtggctgtgggaaggcaaccagtgctgaacgtatatggtaatgattaccaaacaaaggatggcacagcggttcgagattacattcatgtggtagacttggctgatggtcacatttctgcgcttcaga

SEQ ID NO: 617 - DNA, 497 bp, Pinus radiata
gagaatttcgctattgcagaaaccaaaaccaaaattggcgatggggtcacaagggcaaccagaggaaggcttcaacaagtgcgttctggtgactggaggcgctggtttcatcggaagccacaccgccctgcagctcctcgaggatggctacgaggtttatatcatcgacaatttagataactctgttgaagaagcagtgaacagagtgagggatttagttgatcagcgcttccgcctaaatcttcacttttttctgggagatctttgcaacaaagaggatgtagagaaggttttttcattggccaaattcgatgctgtgatacattttgctggattgaaggctgttggagaaagtgtagcaattccattacgttattacaagaacaatctagttggcactctgaacctatatgagattatggccaacatggttgcaaaaagatggttttttcatcatcagctacagttatggccaacccaaggtgattccttgtgta

SEQ ID NO: 618 - DNA, 384 bp, Pinus radiata
gagcgatagtgagcatggagtgccaaggaaagaacattctggtcaccggaggagcaggttatgttggcagtcacactactttgcagttgctgctgggtggttacaaggttgttgtaattgataatctggataactcttcagaagaagctattacaagagttgctaagctcgctggcgaatatgggggcaatctcaccttccataagattgatcttctggataaagaagctatggagaaattgttcttatcaacagaatttgatgctgtcattcattttgctgggttgaaagctgtcggagagagtgtagcaaagccactgctttactacaaaaacaacatagttggcaccttaaacttatttggaaatgattgatttccccaag

SEQ ID NO: 619 - DNA, 354 bp, Pinus radiata
gagcgatagtgagcatggagtgccaaggaaagaacattctggtcaccggaggagcaggttatgttggcagtcacactactttgcagttgctgctgggtggttacaaggttgttgtaattgataatctggataactcttcagaagaagctattacaagagttgctaagctcgctggcgaatatgggggcaatctcaccttccataagattgatcttctggataaagaagctatggagaaattgttcttatcaacagaatttgatgctgtcattcattttgctgggttgaaagctgtcggagagagtgtagcaaagccactgctttactacaaaaacaacatagttggcaccttaa

SEQ ID NO: 620 - DNA, 425 bp, Pinus radiata
gaaggcttcaacaagtgcgttctggtgactggaggcgctggtttcatcggaagccacaccgccctgcagctcctcgaggatggctacgaggtttatatcatcgacaatttagataactctgttgaagaagcagtgaacagagtgagggatttagttgatcagcgcttccgcctaaatcttcacttttttctgggagatctttgcaacaaagaggatgtagagaaggttttttcattggccaaattcgatgctgtgatacattttgctggattgaaggctgttggagaaagtgtagcaattccattacgttattacaagaacaatctagttggcactctgaacctatatgagattatggccaaacatggttgcaaaaagatggttttttcatcatcagctacagtttatggccaacccaaggtgat

SEQ ID NO: 621 - DNA, 623 bp, Eucalyptus grandis
  misc_feature (1)...(623): n = A,T,C or G
ggaatcagagaaatggctgcacacgcatgggctctggttctgggtcttgttctgatggcttctggggcaatgggggctgctccaagaaagcctgtggcggtggcattcggtagaaactacatgcccacatgggctttcgatcacatcaagtacttcaatggtggctccgagatacagctctccttggacaaatacacaggtactggctttcaatccaaggggtcttacctgttcgggcatttcagcatggacatcnagttggttgctgnaagattctgcagggacagtcactgcattctacctctcatctcaaaactcagagcacgacgaaatagactttgagttcttgggtaacaggagtgggcagccgtacatagtgcagaccaatgtgttcacgggtggaaaaggagacagagaacagaggatttatctttggttcgatcccaccgccgcctaccactcctactctgttctctggaacatgtaccagattgtattcttcgtggatgacgtgccgatccgggtgttcaagaacagcaaggaccttggggtgaaattccccttcaaccagccgatgaaattgtactccagcctgtggaatgcggatgctgggcactcgggga

SEQ ID NO: 622 - DNA, 426 bp, Eucalyptus grandis
gcgacttcagagctcgtgaagaaaagcttttgctctcgctcttcttcttcttcttcttcttcttcttcaatggctgtcccggtcttttccaaagtgtctgtgtcgttcggcctgttcgtgggtcttgcgttgttggtgggtctggtcgcgggtgcgaggtttgaggagctctaccagccgggctgggctatggaccattttgtctacgaaggagaggttctcaagctcaagcttgacaactactctggcgctgggttcgggtcgaagagcaagtacatgttcggcaaagttaccatccagatcaagctcgtcgagggcgactcggctgggaccgtcactgctttctacatgtcgtcggatggaccgaaccacaacgaattcgacttcgagttcctgggcaacacgacaggggagccctacctggtc

SEQ ID NO: 623 - DNA, 412 bp, Eucalyptus grandis
  misc_feature (1)...(412): n = A,T,C or G
gcgacttcagagctcgtgaagaaaagcttttgctnctcgctcttcttcttcttcttcttcttcttcttcaatggctgtcccggtcttttccaaagtgtctgtgtcgttcggcctgttcgtgggtcttgcgttgttggtgggtctggtcgcgggtgcgaggtttgaggagctctaccagccgggctgggctatggaccattttgtctacgaaggagaggttctcaagctcaagcttgacaactactctggcgctgggttcgggtcgaagagcaagtacatgttcggcaaagttaccatccagatcaagctcgtcgagggcgactcggctgggaccgtcactgctttctacatgtcgtcggatggaccgaaccacaacgaattcgacttcgagtcctgggcaaacgacagggga

SEQ ID NO: 624 - DNA, 373 bp, Eucalyptus grandis
  misc_feature (1)...(373): n = A,T,C or G
gcgccaagtcgtgtttcttgtggacgagacaccgatccgcgtgcacaccaacatggcgcaccggggcatcccgtacccgaaggaccagcccatgggcgtctacagctcgatatggaacgccgacgactgggccacccagggcggccgcatcaagaccgactggacccacgcccccttcatcacgtcctaccgtaacttcgagatcgacgcgtgcgagtgcccggcgaccatggcggcggcagacaacgccaagcggtgcagcagcgccggcagggagaggcggtactggtgggacgcgcccacggtgtccgagctgagcctccaccagaaccaccagctcaagtgggtccaggcccancacatggtctacgac

SEQ ID NO: 625 - DNA, 351 bp, Eucalyptus grandis
ggaaaaggagacagagaacagaggatttatctttggttcgatcccaccgccgcctaccactcctactctgttctctggaacatgtaccagattgtattcttcgtggatgacgtgccgatccgggtgttcaagaacagcaaggaccttggggtgaaattccccttcaaccagccgatgaaattgtactccagcctgtggaatgcggatgactgggccactcggggagggcttgagaagaccgactggtccaaggcgccgttcgtggcctcttaccgggggttccacattgacgggtgcgaacgtcggttgaggccaagttctgcgcaactcagggccaaggtggtgggacca

SEQ ID NO: 626 - DNA, 270 bp, Eucalyptus grandis
gccgtacatagtgcagaccaatgtgttcacgggaggaaaaggagacagagaacagaggatttatctttggttcgatcccaccgccgcctaccactcctactctgttctctggaacatgtaccagattgtattcttcgtggatgacgtgccgatccgagtgttcaagcacagcaaggaaccttggggtgcaattccccttcaaccagcccgatgaaattgtactccagcctgtggaatgcggatgactgggccactcggggagggcttgag

SEQ ID NO: 627 - DNA, 267 bp, Eucalyptus grandis
gcctgtactatagtgcagaccaatgtgttcacgggaggaaaaggagacagagaacagaggatttatctttggttcgatcccaccgccgcctaccactcctactctgttctctggaacatgtaccagattgtattcttcgtggatgacgtgccgatccgagtgttcaagaacagcaaggaccttggggtgaaattccccttcaaccagccgatgaaattgtactccagcctgtggaatgcggatgactgggccactcgggaggcttga

SEQ ID NO: 628 - DNA, 468 bp, Eucalyptus grandis
  misc_feature (1)...(468): n = A,T,C or G
gagaaacagagcgacttcagagctcgtgaagaaaagcttttgctctcgctcttcttcttcttcttcttcttcttcttcaatggctgtcccggtcttttccaaagtgtctgtgtcgttcggcctgttcgtgggtcttgcgttgttggtgggtctggtcgcgggtgcgaggtttgaggagctctaccagccgggctgggctatggaccattttgtctacgaaggagaggttctcaagctcaagcttgacaactactctggcgctgggttcgggtcgaagagcaagtacatgttcggcaaagttaccatccagatcaagctcgtcgagggcgactcggctgggaccgtnactgctttctacatgtcgtcggatggaccgaaccacaacgaattcgacttcgagttcctgggcaacacgacaggggagccctacctggtaaagaccaacgtgtacgtaaacggggtgggcaa

SEQ ID NO: 629 - DNA, 559 bp, Eucalyptus grandis
gagaaacagagcgacttcagagctcgtgaagaaaagcttttgctctcgctcttcttcttcttcttcttcttcttcttcaatggctgtcccggtcttttccaaagtgtctgtgtcgttcggcctgttcgtgggtcttgcgttgttggtgggtctggtcgcgggtgcgaggtttgaggagctctaccagccgggctgggctatggaccattttgtctacgaaggagaggttctcaagctcaagcttgacaactactctggcgctgggttcgggtcgaagagcaagtacatgttcggcaaagttaccatccagatcaagctcgtcgagggcgactcggctgggaccgtcactgctttctacatgtcgtcggatggaccgaaccacaacgaattcgacttcgagttcctgggcaacacgacaggggagccctacctggtacagaccaacgtgtacgtgaacggggtgggcaaccgggagcagaaggctcggcctctggttcgacccccaccactgacttccactcctactccgtcctctggaaccaaccgccaaagtcgtgtt

SEQ ID NO: 630 - DNA, 416 bp, Eucalyptus grandis
ctcgtgaaaaaagcttttgatctcgatcttcttcttcttcttcttcttcttcttcaatggctgtcccggtcttttccaaagtgtctgtgtcgttcggcctgttcgtgggtcttgcgttgttggtgggtctggtcgcgggtgcaaggtttaaggagctctaccagccgggctgggctatggaccattttgtctacgaaggagaggttctcaagctcaagcttgacaactactctggcgctgggttcgggtcgaagagcaagtacatgttcggcaaagttaccatccagatcaagctcatcgagggcgactcggctgggaccgtcactgctttctacatgtcgtcggatggaccgaaccacaacgaattcgacttcgagttcctggggcaacacgacaggggaaccctacctggtaca

SEQ ID NO: 631 - DNA, 250 bp, Eucalyptus grandis
tggacgagacaccgatccgcgtgcacaccaacatggagcaccggggcatcccgtacccgaaggaccagcccatgggcgtctacagctcgatatggaacgccgacgactgggccacccagggcggccgcatcaagaccgactggacccacgcccccttcatcacgtcctaccgtaacttcgagatcgacgcgtgcgagtgcccggcgacaatggcggcggcagacaccgccaagcggtgcagcagcgccgg

SEQ ID NO: 632 - DNA, 475 bp, Eucalyptus grandis
gagaaacagagcgacttcagagctcgtgaagaaaagcttttgctctcgctcttcttcttcttcttcttcttcttcttcaatggctgtcccggtcttttccaaagtgtctgtgtcgttcggcctgttcgtgggtcttgcgttgttggtgggtctggtcgcgggtgcgaggtttgaggagctctaccagccgggctgggctatggaccattttgtctacgaaggagaggttctcaagctcaagcttgacaactactctggcgctgggttcgggtcgaagagcaagtacatgttcggcaaagttaccatccagatcaagctcgtcgagggcgactcggctgggaccgtcactgctttctacatgtcgtcggatggaccgaaccacaacgaattcgacttcgagttcctgggaacacgacaggggatccctacctggtacagaccaacgtgtacgtgaacggggtgggaaccgggacaa

SEQ ID NO: 633 - DNA, 416 bp, Eucalyptus grandis
  misc_feature (1)...(416): n = A,T,C or G
gagcgacttcagagctcgtgaagaaaagcttttgctctcgctcttcttcttcttcttcttcttcttcttcaatggctgtcccggtcttttccaaagtgtctgtgtcgttcggcctgttcgtgggtcttgcgttgttggtgggtctggtcgcgggtgcgaggtttgaggagctctaccagccgggctgggctatggaccattttgtctacgaaggagaggttctcaagctcaagcttgacaactactctggcgctgggttcgggtcgaagagcaagtacatgttcggcaaagttaccatccagatcangctcgtcgagggcgactcggctgggaccgtcactgctttctacatgtcgtcggatggaccgaaccacaacgaattcgacttcgagttcctgggcaacacgacaggggag

SEQ ID NO: 634 - DNA, 232 bp, Eucalyptus grandis
ggaaaaggagacagagaacagaggatttatctttggttcgatcccaccgccgcctaccactcctactctgttctctggaacatgtaccagattgtattcttcgtggatgacgtgccgatccgggtgttcaagaacagcaaggaccttggggtgaaattccccttcaaccagccgatgaaattgtactccagcctgtggaatgcggatgacttgggcaatccggggagggttt

SEQ ID NO: 635 - DNA, 287 bp, Eucalyptus grandis
  misc_feature (1)...(287): n = A,T,C or G
ccagcctgtggaatgcggatgactgggccactcggggagggcttgagaagaccgactggtccaaggcgccgttcgtggcctctgaccgggggttccacatcgacgggtgcgaacgtcggttgaggccaagtgctgcgctactcagggccagaggtggtgggaccagaaggagttccaggacctcgatgccttccagtaccggaggctccggtgggtgcgctcgagatacaccatctacaactactgcgctgatcggnagaggtaccccgcgatntccccggagtgca

SEQ ID NO: 636 - DNA, 240 bp, Eucalyptus grandis
ggacgagacaccgatccgcgtgcacaccaacttggagcaccggggcatcccgtacccgaaggaccagcccatgggcgtctacagctcgatatggaacgccgacgactgggccacccagggcggccgcatcaagaccgactggacccacgcccccttcatcacgtcctaccgtaacttcgagatcgacgcgtgcgagtgcccggcgaccatggcggcggcagacaacgccaagcggtgcag

SEQ ID NO: 637 - DNA, 360 bp, Eucalyptus grandis
gcacgacgagatcgacttcgagttcctcggcaatctctccgggaacccctacacgctccacaccaacgtgttctcgcaggggaaagggaacagagaacagcaatttcacctctggttcgatcccaccaaggcatttcacacctactcgatcgtctggaacactcgacgcatcatgtaatgtcccaaaagctcatgacgaagacctctttttcctctctatacgaaactagaataccgctcctgttgctgactaacccgcgaattcctatttcagattcttggtggacaacagtcccataagagtgttcaacaacttgggagtcgatcggcgtgcctttcccaagcaaccaacccatgagg

SEQ ID NO: 638 - DNA, 401 bp, Eucalyptus grandis
ctcaagccaaaatataagccaaagtataagccaaagtatagagcaatcatggcccatgaaggtggaggtcctagtgcttcctccatggtggtgctcgtgagcttgctgctgatggctgccgcttcgcccgcagctgggaacttctaccaggacttcgacctgacgtggggtggcagcgaccgggccaagatcttcagcgggggtcagctcctgtcgctgtccctcgacagagtgtcggggtcgggcttccggtccaagaaggagtacctgttcggccggatcgacatgcagctcaagctcgtcgccgggaactccgccggcaccgtgaccgcttactacttgtcttcgcaagggccaactcacgacgagatcgacttcgaagttcctggggaacctgagcg

SEQ ID NO: 639 - DNA, 461 bp, Eucalyptus grandis
agaaacagagcgacttcatagctcgtgaagaaaagcttttgctctcgctcttcttcttcttcttcttcttcttcaatggctgtcccggtcttttccaaagtgtctgtgtcgttcggcctgttcgtgggtcttgcgttgttggtgggtctggtcgcgggtgcgaggtttgaggagctctaccagccgggctgggcctatggaccattttgtctacgaaggagaggttctcatgctcaagcttgacaactactctggcgctgggttcgggtcgaagagcaagtacatgttcggcaaagttaccatccagatcaagctcgtcgagggcgactcggctgggaccgtcactgctttctacatgtcgtcggatggaccgaaccacaacgaattcgacttcgagttcctgggcaacacgacaggggagccctacctggtacagaccaacgtgtacgtgaacggggtgg

SEQ ID NO: 640 - DNA, 458 bp, Eucalyptus grandis
attgacttcgagttcctggggaacctgagcggcgacccttacatcctccacaccaacgtcttcactcaagggaagggcaacagggagcagcagttctacctgtggtttgaccccaccagaaatttccacacatactccgtcatctggaagccccagcacatcatcttcttggtagacaacattcctattagagttttcaagaatggagagtcaattggcgtgcccttccccaagaaccagcccatgaaaatatactcgagcctctggaatgccgatgattgggccacgagaggcggactgatcaagacagactggtcgaaatcgcccttcacggcatactacaggaagttccaggccactgcctgcacctggtccacgggctcgtcctcctgtgagatcggacggcccgcttcctactctggatccacatggaaaatcaatgagctcgatgcctatgg

SEQ ID NO: 641 - DNA, 283 bp, Eucalyptus grandis
ctctggttcgacccaactgctgatttccacacctactccatcctctggaatccacaacgcatcatattctcagtggacgggactcccatcagagagttcaagaacgcagagtccatcggtgttcccttccccaaggcccagcccatgaggatattctcgagcctctggaacgcggacgactgggcgaccagaggcgggctcgtgaagacggactggacacaagcgcccttcactgcttcctaccggaacttcaacgccgataacgcctgcgtttggtcatctg

SEQ ID NO: 642 - DNA, 385 bp, Eucalyptus grandis
gttcggccggatcgaagtcaatctcaccgtgaccgcttactacttgtcttcgcaagggccaactcacgatgagattgacttcgagttcctggggaacctgagcggcgacccttacatcctccacaccaacgtcttcactcaagggaagggcaacagggagcagcagttctacctgtggtttgaccccaccagaaatttccacacatactccgtcatctggaagccccagcacatcatcttcttggtagacaacatcacccatctctctctctctctcccccactctctctcaagccaaaatataagccaaagtataagccaaagtatagagcaatcatggcccatgaaggtggaggtcctagtgcttcctccatggtggtgctcg

SEQ ID NO: 643 - DNA, 378 bp, Eucalyptus grandis
  misc_feature (1)...(378): n = A,T,C or G
ggcacacccattttggccaattcctctccttaatttcaaaangccatggcttttcaaggcgtcctttcgaataagatggccatggcactggttgcccttggcctcttggtggcggccgcggcggcctccggcaacttcaacaaggacttcgacatcacgtggggtgatggccgtgcgcagatacccagcagtggccagctcctcacgctgtccctggacaagacgtcggggtcgggcttccggtccaagaagcagtacttgttcgggaagattgacatgcagctcaaactcgtgcctgggaactccgccggcaccgtcaccgcctattacctttcttctttgggttctgcgcacgacgaaatcgacttcgagtttctc

SEQ ID NO: 644 - DNA, 430 bp, Eucalyptus grandis
gcgacttcagatctcgtgaagaaaagcttttgctctcgctcttcttcttcttcttcttcttcaatggctgtcccggtcttttccaaagtgtctgtgtcgttcggcctgttcgtgggtcttgcgttgttggtgggtctggtcgcgggtgcgaggtttgaggagctctaccagccgggctgggctatggaccattttgtctacgaaggagaggttctcaagctcaagcttgacaactactctggcgctgggttcgggtcgaagagcaagtacatgttcggcaaagttaccatccagatcaagctcgtcgagggcgactcggctgggaccgtcactgccttctacatgtcgtcggatggaccgaaccacaacgaattcgacttcgagttcctgggcaacacgacaggggagccctacctggtacagaccaacg

SEQ ID NO: 645 - DNA, 471 bp, Eucalyptus grandis
ctcaagccaaaatataagccaaagtataagccaaagtatagagcaatcatggcccatgaaggtggaggtcctagtgcttcctccatggtggtgctcgtgagcttgctgctgatggctgccgcttcgcccgcagctgggaacttctaccaggacttcgacctgacgtggggtggcagcgaccgcgccaagatcttcagcgggggtcagctcctgtcgctgtccctcgacagagtgtcggggtcgggcttccggtccaagaaggagtacctgttcggccggatcgacatgcagctcaagctcgtcgccgggaactccgccggcaccgtgaccgcttactacttgtcttcgcaagggccaactcacgatgagattgacttcgagttcctggggaacctgagcggcgacccttacatcctccacaccaacgtcttcactcaagggaagggcaacagggagcagcagttctacctg

SEQ ID NO: 646 - DNA, 480 bp, Eucalyptus grandis
  misc_feature (1)...(480): n = A,T,C or G
aatggctgcacacgcatgggctctggttctgggtcttgttctgatggcttctggggcaatgggggctgctccaagaaagcctgtggcggtggcattcggtagaaactacatgcccacatgggctttcgatcacatcaagtacttcaatggtggctccgagatacagctctccttggacaaatacacaggtactggctttcaatccaaggggtcttacctgttcgggcatttcagcatggacatcaagttggttgctggagattctgcagggacagtcactgcattctacctctcatctcaaaactcagagcacgacgaaatagactttgagttcttgggtaacaggagtgggcagccgtacatagtgcagaccaatgtgttcacgggaggaaaaggagacagagaacagaggatttatctttggttcgatcccaccgncgcctaccactcctactctgttctctggaacatgtaccagat

SEQ ID NO: 647 - DNA, 284 bp, Eucalyptus grandis
ctgttcgtgggtcttgcgttgttggtgggtctggtcgcgggtgcgaggtttgaggagctctaccagccgggctgggctatggaccattttgtctacgaaggagaggttctcaagctcaagcttgacaactactctggcgctgggttcgggtcgaagagcaagtacatgttcggcaaagttaccatccagatcaagctcgtcgagggcgactcggctgggaccgtcactgccttctacatgtcgtcggatggaccgaaccacaacgaattcgacttcgagttcct

SEQ ID NO: 648 - DNA, 459 bp, Eucalyptus grandis
cctcactctcatatcatctcattgagatttgcttctcttcagcaactacagcagcagcagcagcagacagaacacgcccaatatggcctccctttctacttcttcgcttcgcatcgccactctgcttctcgtggtcgtttcttgggggacgtttgcttccgcccgcaacttctatcaagacttcgacataacctggggtgatggccgagctcagatcctcaacaacggcgacctcctcactctctccctcgacaaggcctccggctccggcttccagtccaagaacgagtacttgttcggcaagattgacatgcagctcaagctagttcccggcaactccgctggcaccgtcaccgcatactatttatcttcaaacgggtcggcgtgggatgagatagacttcgagttcttggggaacttgagcggcgatccatacattctccacaccaacgtcttcag

SEQ ID NO: 649 - DNA, 402 bp, Eucalyptus grandis
gcgacttcagagctcgtgaagaaaagcttttgctctcgctcttcttcttcttcttcttcttcaatggctgtcccggtcttttccaaagtgtctgtgtcgttcggcctgttcgtgggtcttgcgttgttggtgggtctggtcgcgggtgcgaggtttgaggagctctaccagccgggctgggctatggaccattttgtctacgaaggagaggttctcaagctcaagcttgacaactactctggcgctgggttcgggtcgaagagcaagtacatgttcggcaaagttaccatccagatcaagctcgtcgagggcgactcggctgggaccgtcactgccttctacatgtcgtcggatggaccgaaccacaacgaattcgacttcgagttcctgggcaacacgaca

SEQ ID NO: 650 - DNA, 469 bp, Eucalyptus grandis
gagaaacagagcgacttcagagctcgtgaagaaaagcttttgctctcgctcttcttcttcttcttcttcttcaatggctgtcccggtcttttccaaagtgtctgtgtcgttcggcctgttcgtgggtcttgcgttgttggtgggtctggtcgcgggtgcgaggtttgaggagctctaccagccgggctgggctatggaccattttgtctacgaaggagaggttctcaagctcaagcttgacaactactctggcgctgggttcgggtcgaagagcaagtacatgttcggcaaagttaccatccagatcaagctcgtcgagggcgactcggctgggaccgtcactgccttctacatgtcgtcggatggaccgaaccacaacgaattcgacttcgagttcctgggcaacacgacaggggagccctacctggtacagaccaacgtgtacgtgaacggggtgggcaaccgggag

SEQ ID NO: 651 - DNA, 473 bp, Eucalyptus grandis
gagaaacagagcgacttcagagctcgtgaagaaaagcttttgctctcgctcttcttcttcttcttcttcttcttcaatggctgtcccggtcttttccaaagtgtctgtgtcgttcggcctgttcgtgggtcttgcgttgttggtgggtctggtcgcgggtgcgaggtttgaggagctctaccagccgggctgggctatggaccattttgtctacgaaggagaggttctcaagctcaagcttgacaactactctggcgctgggttcgggtcgaagagcaagtacatgttcggcaaagttaccatccagatcaagctcgtcgagggcgactcggctgggaccgtcactgctttctacatgtcgtcggatggaccgaaccacaacgaattcgacttcgagttcctgggcaacacgacaggggagccctacctggtacagaccaacgtgtacgtgaacggggtgggcaaccgggagc

SEQ ID NO: 652 - DNA, 454 bp, Eucalyptus grandis
gagaaacagagcgacttcagagctcgtgaagaaaagcttttgctctcgctcttcttcttcttcttcttcttcttcaatggctgtcccggtcttttccaaagtgtctgtgtcgttcggcctgttcgtgggtcttgcgttgttggtgggtctggtcgcgggtgcgaggtttgaggagctctaccagccgggctgggctatggaccattttgtctacgaaggagaggttctcaagctcaagcttgacaactactctggcgctgggttcgggtcgaagagcaagtacatgttcggcaaagttaccatccagatcaagctcgtcgagggcgactcggctgggaccgtcactgctttctacatgtcgtcggatggaccgaaccacaacgaattcgacttcgagttcctgggcaacacgacaggggagccctacctggtacagaccaacgtgtacgtgaac

SEQ ID NO: 653 - DNA, 435 bp, Eucalyptus grandis
gtttgaggagctctaccagccgggctgggctatggaccattttgtctacgaaggagaggttctcaagctcaagcttgacaactactctggcgctgggttcgggtcgaagagcaagtacatgttcggcaaagttaccatccagatcaagctcgtcgaagggcgactcggctgggaccgtcactgctttctacatgtcgtcggatggaccgaaccacaacgaattcgacttcgagttcctgggcaacacgacaggggagccctacctggtacagaccaacgtgtacgtgaacggggtgggcaaccgggagcagaggctcggcctctggttcgaccccaccactgacttccactcctactccgtcctctggaaccagcgccaagtcgtgtttcttgtggacgagacaccgatccgcgtgcacaccaacttggagcacc

SEQ ID NO: 654 - DNA, 386 bp, Eucalyptus grandis
ctcaagccaaaatataagccaaagtataagccaaagtatagagcaatcatggcccatgaaggtggaggtcctagtgcttcctccatggtggtgctcgtgagcttgctgctgatggctgccgcttcgcccgcagctgggaacttctaccaggacttcgacctgacgtggggtggcagcgaccgggccaagatcttcagcgggggtcagctcctgtcgctgtccctcgacagagtgtcggggtcgggcttccggtccaagaaggagtacctgttcggccggatcgacatgcagctcaagctcgtcgccgggaactccgccggcaccgtgaccgcttactacttgtcttcgcaagggccaactcacgacgagatcgacttcgagttcct

SEQ ID NO: 655 - DNA, 289 bp, Eucalyptus grandis
  misc_feature (1)...(289): n = A,T,C or G
ggaacttctaccaggacttcgacctgacgtggggtggcagcgaccgggccaagatcttcagcgggggtcagctcctgtcgctgtccctcgacagagtgtcggggtcgggcttccggtccaagaaggagtacctgttcggccggatcgacatgcagctcangctcgtcgccgggaactccgccggctccgtgaccgcttactacttgtcttcgcaagggccaactcacgacgagatcgacttcgagttcctggggaacctgagcggcgacccttacatcctccacaccan

SEQ ID NO: 656 - DNA, 422 bp, Eucalyptus grandis
ctctctcccccactctctctcaagccaaaatataagccaaagtataagccaaagtatagagcaatcatggcccatgaaggtggaggtcctagtgcttcctccatggtggtgctcgtgagcttgctgctgatggctgccgcttcgcccgcagctgggaacttctaccaggacttcgacctgacgtggggtggcagcgaccgcgccaagatcttcagcgggggtcagctcctgtcgctgtccctcgacagagtgtcggggtcgggcttccggtccaagaaggagtacctgttcggccggatcgacatgcagctcaagctcgtcgccgggaactccgccggctccgtgaccgcttactacttgtcttcgcaagggccaactcacgatgagattgacttcgagttcctggggaacctgagcggcga

SEQ ID NO: 657 - DNA, 445 bp, Eucalyptus grandis
gaaccacaacgaattcgacttcgagttcctgggcaacacgacaggggagccctacctggtacagaccaacgtgtacgtgaacggggtgggcaaccgggagcagaggctcggcctctggttcgaccccaccactgacttccactcctactccgtcctctggaaccagcgccaagtcgtgtttcttgtggacgagacaccgatccgcgtgcacaccaacttggagcaccggggcatcccgtacccgaaggaccagcccatgggcgtctacagctcgatatggaacgccgacgactgggccacccagggcggccgcatcaagaccgactggacccacgcccccttcatcacgtcctaccgtaacttcgagatcgacgcgtgcgagtgcccggcgaccatggcggcggcagacaacgccaagcggtgcagcagcgccggcagggagagg

SEQ ID NO: 658 - DNA, 310 bp, Eucalyptus grandis
ggatttatctttggttcgatcccaccgccgcctaccactcctactctgttctctggaacatgtaccagattgtattcttcgtggatgacgtgccgatccgggtgttcaagaacagcaaggaccttggggtgaaattccccttcaaccagccgatgaaattgtactccagcctgtggaatgcggatgactgggccactcggggagggcttgagaagaccgactggtccaaggcgccgttcgtggcctcttaccgggggttccacattgacgggtgcgaagcgtcggttgaggccaagttctgcgctactca

SEQ ID NO: 659 - DNA, 482 bp, Eucalyptus grandis
aaacagagcgacttcagagctcgtgaagaaaagcttttgctctcgctcttcttcttcttcttcttcttcaatggctgtcccggtcttttccaaagtgtctgtgtcgttcggcctgttcgtgggtcttgcgttgttggtgggtctggtcgcgggtgcgaggtttgaggagctctaccagccgggctgggctatggaccattttgtctacgaaggagaggttctcaagctcaagcttgacaactactctggcgctgggttcgggtcgaagagcaagtacatgttcggcaaagttaccatccagatcaagctcgtcgagggcgactcggctgggaccgtcactgccttctacatgtcgtcggatggaccgaaccacaacgaattcgacttcgagttcctgggcaacacgacaggggagccctacctggtacagaccaacgtgtacgtgaacggggtgggcaaccgggagcagaggctcggcctct

SEQ ID NO: 660 - DNA, 415 bp, Eucalyptus grandis
gagaaacagagcgacttcagagctcgtgaagaaaagcttttgctctcgctcttcttcttcttcttcttcttcttcaatggctgtcccggtcttttccaaagtgtctgtgtcgttcggcctgttcgtgggtcttgcgttgttggtgggtctggtcgcgggtgcgaggtttgaggagctctaccagccgggctgggctatggaccattttgtctacgaaggagaggttctcaagctcaagcttgacaactactctggcgctgggttcgggtcgaagagcaagtacatgttcggcaaagttaccatccagatcaagctcgtcgagggcgactcggctgggaccgtcactgctttctacatgtcgtcggatggaccgaaccacaacgaattcgacttcgagttcctgggcaacacgaca

SEQ ID NO: 661 - DNA, 542 bp, Eucalyptus grandis
ctctctcaagccaaaatataagccaaagtataagccaaagtatagagcaatcatggcccatgaaggtggaggtcctagtgcttcctccatggtggtgctcgtgagcttgctgctgatggctgccgcttcgcccgcagctgggaacttctaccaggacttcgacctgacgtggggtggcagcgaccgggccaagatcttcagcgggggtcagctcctgtcgctgtccctcgacagagtgtcggggtcgggcttccggtccaagaaggagtacctgttcggccggatcgacatgcagctcaagctcgtcgccgggaactccgccggcaccgtgaccgcttactacttgtcttcgcaagggccaactcacgacgagatcgacttcgagttcctggggaacctgagcggcgacccttacatcctccacaccaacgtcttcactcaagggaagggcaacagggagcagcagttctacctgtggtttgaccccaccaggaatttccacacatactccgtcatctggaagccccagcacatcatcttct

SEQ ID NO: 662 - DNA, 300 bp, Eucalyptus grandis
gtcgcgggtgcgaggtttgaggagctctaccagccgggctgggctatggaccattttgtctacgaaggagaggttctcaagctcaagcttgacaactactctggcgctgggttcgggtcgaagagcaagtacatgttcggcaaagttaccatccagatcaagctcgtcgagggcgactcggctgggaccgtcactgctttctacatgtcgtcggatggaccgaaccacaacgaattcgacttcgagttcctgggcaacacgacaggggagccctacctggtacagaccaacgtgtacgtg

SEQ ID NO: 663 - DNA, 424 bp, Eucalyptus grandis
tcaagctcaagcttgacaactactctggcgctgggttcgggtcgaagagcaagtacatgttcggcaaagttaccatccagatcaagctcgtcgagggcgactcggctgggaccgtcactgctttctacatgtcgtcggatggaccgaaccacaacgaattcgacttcgagttcctgggcaacacgacaggggagccctacctggtacagaccaacgtgtacgtgaacggggtgggcaaccgggagcagaggctcggcctctggttcgaccccaccactgacttccactcctactccgtcctctggaaccagcgccaagtcgtgtttcttgtggacgagacaccgatccgcgtgcacaccaacttggagcaccggggcatcccgtacccgaaggaccagcccatgggcgtctacagctcgatatg

SEQ ID NO: 664 - DNA, 456 bp, Eucalyptus grandis
cagcagcagcagcaacagaaaacaaaacgcgcccaatatggcctctcggtccacttcttctctttgtaccgccgcgcttcttcttatcatggtcgtttcttgggcaacatccgcttccgcccgcaacttttatcaagacttcgacataacctggggagatggccgagctcagatcctcaacaatggcgacctcctcactctctcccttgacaaggcctccggctccggcttccagtccaagaacgagtacttgttcggcaagattgacatgcagctcaagctcgttcctggcaactccgcaggcactgtcaccgcatactatttatcttcaaatgggtcaacgtgggacgagatagacttcgagttcttggggaacttgagcggcgatccctacattcttcacaccaacgtgttcagccaaggcaagggcaaccgagagcagcaattctatctctg

SEQ ID NO: 665 - DNA, 420 bp, Eucalyptus grandis
cgaccattgcagattctcagtggatgggactccgatcagagagttcaagaacgcagagtccatcggcgttcccttccccaaggcccagcccatgaggatattctcgagcctctggaacgcggacgactgggcaaccagaggcgggctcgtaaagacagattggacacaagcgcccttcactgcttcctacaggaacttcaatgctgataacgcctgcgtttcgtcatctgggtcctcatcttgcacttcgtcttcatcttcttcggatggtaatgcatggctatcggaagagctcgactcaacaagccaagagaggctgaagtgggttcagagcaactacatgatctacaactactgtacagatgccaaaagattcccccaaggcgtccctcctgagtgcaccatgtcctagacgacaca

SEQ ID NO: 666 - DNA, 434 bp, Eucalyptus grandis
aacagagcgacttcagagctcgtgaagaaaagcttttgctctcgctcttcttcttcttcttcttcttcaatggctgtcccggtcttttccaaagtgtctgtgtcgttcggcctgttcgtgggtcttgcgttgttggtgggtctggtcgcgggtgcgaggtttgaggagctctaccagccgggctgggctatggaccattttgtctacgaaggagaggttctcaagctcaagcttgacaactactctggcgctgggttcgggtcgaagagcaagtacatgttcggcaaagttaccatccagatcaagctcgtcgagggcgactcggctgggaccgtcactgccttctacatgtcgtcggatggaccgaaccacaacgaattcgacttcgagttcctgggcaacacgacaggggagccctacctggtacagaccaa

SEQ ID NO: 667 - DNA, 464 bp, Eucalyptus grandis
gcgacttcagagctcgtgaagaaaagcttttgctctcgctcttcttcttcttcttcttcttcaatggctgtcccggtcttttccaaagtgtctgtgtcgttcggcctgttcgtgggtcttgcgttgttggtgggtctggtcgcgggtgcgaggtttgaggagctctaccagccgggctgggctatggaccattttgtctacgaaggagaggttctcaagctcaagcttgacaactactctggcgctgggttcgggtcgaagagcaagtacatgttcggcaaagttaccatccagatcaagctcgtcgagggcgactcggctgggaccgtcactgccttctacatgtcgtcggatggaccgaaccacaacgaattcgacttcgagttcctgggcaacacgacaggggagccctacctggtacagaccaacgtgtacgtgaacggggtgggcaaccgggagcagag

SEQ ID NO: 668 - DNA, 457 bp, Eucalyptus grandis
tctctctctcccccactctctctcaagccaaaatataagccaaagtataagccaaagtatagagcaatcatggcccatgaaggtggaggtcctagtgcttcctccatggtggtgctcgtgagcttgctgctgatggctgccgcttcgcccgcagctgggaacttctaccaggacttcgacctgacgtggggtggcagcgaccgcgccaagatcttcagcgggggtcagctcctgtcgctgtccctcgacagagtgtcggggtcgggcttccggtccaagaaggagtacctgttcggccggatcgacatgcagctcaagctcgtcgccgggaactccgccggcaccgtgaccgcttactacttgtcttcgcaagggccaactcacgatgagattgacttcgagttcctggggaacctgagcggcgacccttacatcctccacaccaacgtcttcactc

SEQ ID NO: 669 - DNA, 434 bp, Eucalyptus grandis
ggctgcacacgcatgggctctggttctgggtcttgttctgatggcttctggggcaatgggggctgctccaagaaagcctgtggcggtggcattcggtagaaactacatgcccacatgggctttcgatcacatcaagtacttcaatggtggctccgagatacagctctccttggacaaatacacaggtactggctttcaatccaaggggtcttacctgttcgggcatttcagcatggacatcaagttggttgctggagattctgcagggacagtcactgcattctacctctcatctcaaaactcagagcacgacgaaatagactttgagttcttgggtaacaggagtgggcagccgtacatagtgcagaccaatgtgttcacgggaggaaaaggagacagagaacagaggatttatctttggttcgatcccaccg

SEQ ID NO: 670 - DNA, 294 bp, Eucalyptus grandis
atggcttctggggcaatgggggctgctccaagaaagcctgtggcggtggcattcggtagaaactacatgcccacatgggctttcgatcacatcaagtacttcaatggtggctccgagatacagctctccttggacaaatacacaggtactggctttcaatccaaggggtcttacctgttcgggcatttcagcatggacatcaagttggttgctggagattctgcagggacagtcactgcattctacctctcatctcaaaactcagagcacgacgaaatagactttgagttcttg

SEQ ID NO: 671 - DNA, 396 bp, Eucalyptus grandis
  misc_feature (1)...(396): n = A,T,C or G
agagcaatcatggcccatgaaggtggaggtcctagtgcttcctccatggtggtgctcgtgagcttgctgctgatggctgccgcttngcccgcagctgggaacttctaccaggacttcgacctgacgtggggtggcagcgaccgggccaagatcttcagcgggggtcaantcctgtcgctgtccctcgacagagtgtcggggtcgggcttccggtccaagaaggagtacctgttcggccggatcgacatgcagctcaagctcgtcgccgggaactccgccggcaccgtgaccgcttactacttgtcttcgcaagggccaactcacgacgagatcgacttcgagttcctggggaacctgagcggcgacccttacatcctccacaccaacgttttcact

SEQ ID NO: 672 - DNA, 287 bp, Eucalyptus grandis
  misc_feature (1)...(287): n = A,T,C or G
gggtctggncgcgggtgcgaggtttgaggagctntaccagccgggctgggctatggaccattttgtctacgaaggagaggttctcaagctcaagcttgacaactactctggcgctgggttcgggncgaagagcaagtacatgttcggcaaagttaccatccagatcaagctcgncgagggcgactcggctgggaccgtcactgccttctacatgtcgtcggatggaccgaaccacaacgaattcgacttcgagttcctgggcaacacgacaggggagccctacctgg

SEQ ID NO: 673 - DNA, 445 bp, Eucalyptus grandis
  misc_feature (1)...(445): n = A,T,C or G
gcgacttcagagctcgtgaagaaaagcttttgctctcgctcttcttcttcttcttcttcttcttcaatggctgtcccggtcttttccaaagtgtctgtgtcgttcggcctgttcgtgggtcttgcgttgttggtgggtctggtcgcgggtgcgaggtttgaggagctctaccagccgggctgggctatggaccattttgtctacnaaggagaggttctcaagctcaagcttgacaactactctggcgctgggttcgggtcgaagagcaagtacatgttcggcaaagttaccatccagatcaagctcgtcgagggcgactcggctgggaccgtcactgctttctacatgtcgtcggatggaccgaaccacaacgaattcgacttcgagttcctgggcaacacgacaggggagccctacctggtacagaccaacgtgtaccgtgaac

SEQ ID NO: 674 - DNA, 387 bp, Eucalyptus grandis
cacacccaattggccaattcctctccttaatttcaaaaagccatggctttcaaggcgtcctttcgaataagatggccatggcactggttgcccttggcctcttggtggcggccgcggcggcctccggcaacttcaacaaggacttcgacatcacgtggggtgatggccgtgcgcagatacccagcagtggccagctcctcacgctgtccctggacaagacgtcggggtcgggcttccggtccaagaagcagtacttgttcgggaagattgacatgcagctcaaactcgtgcctgggaactccgccggcaccgtcaccgcctattacctttcttctttgggttctgcgcacgacgaaatcgacttcgagtttctcggtaacctgagcg

SEQ ID NO: 675 - DNA, 324 bp, Eucalyptus grandis
ctcgcactcggctggcatgaccgggaaccgcgccgtgtccttgcagtagtcgtagaccatgtggtgggcctggacccacttgagctggtggttctggtggaggctcagctcggacaccgtgggctcgtcccaccagtaccgcctctccctgccggcgctgctgcaccgcttggcgttgtctgccgccgccatggtcgccgggcactcgcacgcgtcgatctcgaagttacggtaggacgtgatgaagggggcgtgggtccagtcggtcttgatgcggccgcctgggtggcccagtcgtcggcgttccatatcgagctgtagacg

SEQ ID NO: 676 - DNA, 330 bp, Eucalyptus grandis
cgcctccggccataggcatcgagctcattgattttccatgtggatccagagtaggaagcgggccgtccgatctcacaggaggacgagcccgtggaccaggtgcaggcagtggcctggaacttcctgtagtatgccgtgaagggcgctttcgaccagtctgtcttgatcagtccgcctctcgtggcccaatcatcggcattccagaggctcgagtatattttcatgggctggttcttggggaagggcacgccaattgactctccattcttgaaaactctaataggaatgttgtctaccaagaagatgatgtgctggggcttccagatgacg

SEQ ID NO: 677 - DNA, 438 bp, Eucalyptus grandis
gtgagaaacagagcgacttcagagctcgtgaagaaaagcttttgctctcgctcttcttcttcttcttcttcttcttcttcttcaatggctgtcccggtcttttccaaagtgtctgtgtcgttcggcctgttcgtgggtcttgcgttgttggtgggtctggtcgcgggtgcgaggtttgaggagctctaccagccgggctgggctatggaccattttgtatacgaaggagaggttctcaagctcaagcttgacaactactctggcgctgggttcgggtcgaagagcaagtacatgttcggcaaagttaccatccagatcaagctcgtcgagggcgactcggctgggaccgtcactgctttctacatgtcgtcggatggaccgaaccacaacgaattcgacttcgagttcctgggcaacacgacaggggagccctacctg

SEQ ID NO: 678 - DNA, 362 bp, Eucalyptus grandis
gtctggtcgcgggtgcgaggtttgaggagctctaccagccgggctgggctatggaccattttgtctacgaaggagaggttctcaagctcaagcttgacaactactctggcgctgggttcgggtcgaagagcaagtacatgttcggcaaagttaccatccagatcaagctcgtcgagggcgactcggctgggaccgtcactgctttctacatgtcgtcggatggaccgaaccacaacgaattcgacttcgagttcctgggcaacacgacaggggagccctacctggtacagaccaacgtgtacgtgaacggggtgggcaaccgggagcagaggctcggcctctggttcgaccccaccactgac

SEQ ID NO: 679 - DNA, 424 bp, Eucalyptus grandis
gtcgccgggcactcgcacgcgtcgatctcgaagttacggtaggacgtgatgaagggggcgtgggtccagtcggtcttgatgcggccgccctgggtggcccagtcgtcggcgttccatatcgagctgtagacgcccatgggctggtccttcgggtacgggatgccccggtgctccaagttggtgtgcacgcggatcggtgtctcgtccacaaaaacacgacttggcgctggttccagaggacggagtaggagtggaagtcagtggtggggtcgaaccagaggccgagcctctgctcccggttgcccaccccgttcacgtacacgttggtctgtaccaggtagggctcccctgtcgtgttgcccaggaactcgaagtcgaattcgttgtggttcggtccatccgacgacatgtagaaagcagtgac

SEQ ID NO: 680 - DNA, 414 bp, Eucalyptus grandis
gtcgccgggcactcgcacgcgtcgatctcgaagttacggtaggacgtgatgaagggggcgtgggtccagtcggtcttgatgcggccgccctgggtggcccagtcgtcggcgttccatatcgagctgtagacgcccatgggctggtccttcgggtacgggatgccccggtgctccaagttggtgtgcacgcggatcggtgtctcgtccacaagaaacacgacttggcgctggttccagaggacggagtaggagtggaagtcagtggtggggtcgaaccagaggccgagcctctgctcccggttgcccaccccgttcacgtacacgttggtctgtaccaggtagggctcccctgtcgtgttgcccaggaactcgaagtcgaattcgttgtggttcggtccatccgacgacatgtag

SEQ ID NO: 681 - DNA, 239 bp, Eucalyptus grandis
ggccgtccgatctcgcaggacgacgagcccgtggaccaggtgcaggcagtggcctggaacttcctgtagtatgccgtgaagggcgctttcgaccagtccgtcttgatcagtccgcctctcgtggcccaatcatcggcattccagaggctcgagtatatcttcatgggctggctcttggggaagggcacgccaattgactctgcattcttgaaaactctgataggaatgttgtctaccaa

SEQ ID NO: 682 - DNA, 319 bp, Eucalyptus grandis
cccagtcccacacccatcttttatcaaagacacggaaatagatgaacgaatagtggtaaaacataacttaagcaacaacaatatagcatccaatatctatcttcttaggctcatccttcatgcttagcttcttagtctctcatgaccaccaaattcagaatttgatcaggcgtccctgtccctcctgcactccggggacattgcggggtacctcttccgatcggcgcagtagttgtagatggtgtatttcgagcgcacccaccggagcctccggtactggaaggcatcgaggtcctggaactccttctggtcccaccac

SEQ ID NO: 683 - DNA, 424 bp, Eucalyptus grandis
ggccgtccgatctcgcaggacgacgagcccgtggaccaggtgcaggcagtggcctggaacttcctgtagtatgccgtgaagggcgctttcgaccagtccgtcttgatcagtccgcctctcgtggcccaatcatcggcattccagaggctcgagtatatcttcatgggctggctcttggggaagggcacgccaattgactctgcattcttgaaaactctgataggaatgttgtctaccaagaagatgatgtgctggggcttccagatgacggagtatgtgtggaaatttctggtggggtcaaaccacaggtagaactgctgctccctgttgcccttcccttgagtgaagacgttggtgtggaggatgtaagggtcgccgctcaggttccccaggaactcgaagtcaatctcgtcgtgagttggcc

SEQ ID NO: 684 - DNA, 309 bp, Eucalyptus grandis
gtctggtcgcgggtgcgaggtttgaggagctctaccagccgggctgggctatggaccattttgtctacgaaggagaggttctcaagctcaagcttgacaactactctggcgctgggttcgggtcgaagagcaagtacatgttcggcaaagttaccatccagatcaagctcgtcgagggcgactcggctgggaccgtcactgctttctacatgtcgtcggatggaccgaaccacaacgaattcgacttcgagttcctgggcaacacgacaggggagccctacctggtacagaccaacgtgtacgtgaacg

SEQ ID NO: 685 - DNA, 238 bp, Eucalyptus grandis
gtcgccgggcactcgcacgcgtcgatctcgaagttacggtaggacgtgatgaagggggcgtgggtccagtcggtcttgatgcggccgccctgggtggcccagtcgtcggcgttccatatcgagctgtagacgcccatgggctggtccttcgggtacgggatgccccggtgctccaagttggtgtgcacgcggatcggtgtctcgtccacaagaaacacgacttggcgctggttccaga

SEQ ID NO: 686 - DNA, 515 bp, Eucalyptus grandis
  misc_feature (1)...(515): n = A,T,C or G
gagaaacagagcgacttcagagctcgtgaagaaaagcttttgctctcgctcttcttcttcttcttcttcttcttcttcttcaatggctgtcccggtcttttccaaagtgtctgtgtcgttcggcctgttcgtgggtcttgcgttgttggtgggtctggtcgcgggtgcgaggtttgaggagctctaccagccgggctgggctatggaccattttgtctacgaaggagaggttctcaagctcaagcttgacaactactctggcgctgggttcgggtcgaagagcaagtacatgttcggcaaagttaccatccagatcaagctcgtcgagggcgactcggctgggaccgtcactgctttctacatgtcgtcggatggaccgaaccacaacgaattcgacttcnagttcctgggcaacacgacaggggagccctacctggtacagaccaacgtgtacgtgaacggggtgggcaaccgggagcagaggctcggcctctggttcgaccccaccactgact

SEQ ID NO: 687 - DNA, 445 bp, Eucalyptus grandis
ggccgtccgatctcgcaggacgacgagcccgtggaccaggtgcaggcagtggcctggaacttcctgtagtatgccgtgaagggcgctttcgaccagtccgtcttgatcagtccgcctctcgtggcccaatcatcggcattccagaggctcgagtatatcttcatgggctggctcttggggaagggcacgccaattgactctgcattcttgaaaactctgataggaatgttgtctaccaagaagatgatgtgctggggcttccagatgacggagtatgtgtggaaatttctggtggggtcaaaccacaggtagaactgctgctccctgttgcccttcccttgagtgaagacgttggtgtggaggatgtaagggtcgccgctcaggttccccaggaactcgaagtcaatctcgtcgtgagttggcccttgcgaagacaagtagtaag

SEQ ID NO: 688 - DNA, 422 bp, Eucalyptus grandis
gtctggtcgcgggtgcgaggtttgaggagctctaccagccgggctgggctatggaccattttgtctacgaaggagaggttctcaagctcaagcttgacaactactctggcgctgggttcgggtcgaagagcaagtacatgttcggcaaagttaccatccagatcaagctcgtcgagggcgactcggctgggaccgtcactgctttctacatgtcgtcggatggaccgaaccacaacgaattcgacttcgagttcctgggcaacacgacaggggagccctacctggtacagaccaacgtgtacgtgaacggggtgggcaaccgggagcagaggctcggcctctggttcgaccccaccactgacttccactcctactccgtcctctggaaccagcgccaagtcgtgtttcttgtggacgagaca

SEQ ID NO: 689 - DNA, 279 bp, Eucalyptus grandis
  misc_feature (1)...(279): n = A,T,C or G
tgcaaggtttgaggagctctaccagccgggctgggctatggaccattttgtctacgaaggagaggttctcaagctcaagcttgacaactactctggcgctgggttcgggtcaaagagcaagtacatgttcggcaaagttaccatncagatcaagctcgtctagggcgactcggctgggaccgtcactgctttctacatgtcgtcggatggaccgaaccacaacgaattcgacttcgagttcctgggcaacacgacaggggagccctacctggtacagac

SEQ ID NO: 690 - DNA, 452 bp, Eucalyptus grandis
agcgacttcagagctcgtgaagaaaagcttttgctctcgctcttcttcttcttcttcttcttcttcttcttcaatggctgtcccggtcttttccaaagtgtctgtgtcgttcggcctgttcgtgggtcttgcgttgttggtgggtctggtcgcgggtgcgaggtttgaggagctctaccagccgggctgggctatggaccattttgtctacgaaggagaggttctcaagctcaagcttgacaactactctggcgctgggttcgggtcgaagagcaagtacatgttcggcaaagttaccatccagatcaagctcgtcgagggcgactcggctgggaccgtcactgctttctacatgtcgtcggatggaccgaaccacaacgaattcgacttcgagttcctgggcaacacgacaggggagccctacctggtacagaccaacgtgtacgtgaacg

SEQ ID NO: 691 - DNA, 346 bp, Eucalyptus grandis
cgcctccggccataggcatcgagctcattgattttccatgtggatccagagtaggaagcgggccgtccgatctcacaggaggacgagcccgtggaccaggtgcaggcagtggcctggaacttcctgtagtatgccgtgaagggcgctttcgaccagtctgtcttgatcagtccgcctctcgtggcccaatcatcggcattccagaggctcgagtatattttcatgggctggttcttggggaagggcacgccaattgactctccattcttgaaaactctaataggaatgttgtctaccaagaagatgatgtgctggggcttccagatgacggagtatgtgtggaaat

SEQ ID NO: 692 - DNA, 470 bp, Eucalyptus grandis
ggccgtccgatctcgcaggacgacgagcccgtggaccaggtgcaggcagtggcctggaacttcctgtagtatgccgtgaagggcgctttcgaccagtccgtcttgatcagtccgcctctcgtggcccaatcatcggcattccagaggctcgagtatatcttcatgggctggctcttggggaagggcacgccaattgactctgcattcttgaaaactctgataggaatgttgtctaccaagaagatgatgtgctggggcttccagatgacggagtatgtgtggaaatttctggtggggtcaaaccacaggtagaactgctgctccctgttgcccttcccttgagtgaagacgttggtgtggaggatgtaagggtcgccgctcaggttccccaggaactcgaagtcaatctcgtcgtgagttggcccttgcgaagacaagtagtaagcggtcacggtgccggcggagttccc

SEQ ID NO: 693 - DNA, 374 bp, Eucalyptus grandis
gtcgccgggcactcgcacgcgtcgatctcgaagttacggtaggacgtgatgaagggggcgtgggtccagtcggtcttgatgcggccgccctgggtggcccagtcgtcggcgttccatatcgagctgtagacgcccatgggctggtccttcgggtacgggatgccccggtgctccaagttggtgtgcacgcggatcggtgtctcgtccacaagaaacacgacttggcgctggttccagaggacggagtaggagtggaagtcagtggtggggtcgaaccagaggccgagcctctgctcccggttgcccaccccgttcacgtacacgttggtctgtaccaggtagggctcccctgtcgtgttgcccaagaactcgaa

SEQ ID NO: 694 - DNA, 409 bp, Eucalyptus grandis
gagaaacagagcgacttcagagctcgtgaagaaaagcttttgctctcgctcttcttcttcttcttcttcttcttcttcttcaatggctgtcccggtcttttccaaagtgtctgtgtcgttcggcctgttcgtgggtcttgcgttgttggtgggtctggtcgcgggtgcgaggtttgaggagctctaccagccgggctgggctatggaccattttgtctacgaaggagaggttctcaagctcaagcttgacaactactctggcgctgggttcgggtcgaagagcaagtacatgttcggcaaagttaccatccagatcaagctcgtcgagggcgactcggctgggaccgtcactgctttctacatgtcgtcggatggaccgaaccacaacgaattcgacttcgagttcctg

SEQ ID NO: 695 - DNA, 224 bp, Eucalyptus grandis
tgccccggtgctccaagttggtgtgcacgcggatcggtgtctcgtccacaagaaacacgacttggcgctggttccagaggacggagtaggagtggaagtcagtggtggggtcgaaccagaggccgagcctctgctcccggttgcccaccccgttcacgtacacgttggtctgtaccaggtagggctcccctgtcgtgttgcccaggaactcgaagtcgaattcg

SEQ ID NO: 696 - DNA, 442 bp, Eucalyptus grandis
gtctggtcgcgggtgcgaggtttgaggagctctaccagccgggctgggctatggaccattttgtctacgaaggagaggttctcaagctcaagcttgacaactactctggcgctgggttcgggtcgaagagcaagtacatgttcggcaaagttaccatccagatcaagctcgtcgagggcgactcggctgggaccgtcactgctttctacatgtcgtcggatggaccgaaccacaacgaattcgacttcgagttcctgggcaacacgacaggggagccctacctggtacagaccaacgtgtacgtgaacggggtgggcaaccgggagcagaggctcggcctctggttcgaccccaccactgacttccactcctactccgtcctctggaaccagcgccaagtcgtgtttcttgtggacgagacaccgatcccgcgtgcacacca

SEQ ID NO: 697 - DNA, 408 bp, Eucalyptus grandis
  misc_feature (1)...(408): n = A,T,C or G
gagaaacagacgacttcagagctcgtgaagaaaagcttttgctctcgctcttcttcttcttcttcttcttcttcttcttcaatggctgtcccggtcttttccaaagtgtntgtgtcgttcggcctgttcntgggtcttgcgttgntggtgggtctggtcgcgggtgcgaggtttgaggagctctaccagccgggctgggctatggaccattttgtctacgaaggagaggttctcaagctcaagcttgacaactactctggcgctgggttcgggtcgaagagcaagtacatgttcggcaaagttaccatccagatcaagctcgtcgagggcgactcggctgggaccgtcactgctttctacatgtcgtcggatggaccgaaccacaacgaattcgacttcgagttcctg

SEQ ID NO: 698 - DNA, 469 bp, Eucalyptus grandis
agcgacttcagagctcgtgaagaaaagcttttgctctcgctcttcttcttcttcttcttcttcttcttcttcaatggctgtcccggtcttttccaaagtgtctgtgtcgttcggcctgttcgtgggtcttgcgttgttggtgggtctggtcgcgggtgcgaggtttgaggagctctaccagccgggctgggctatggaccattttgtctacgaaggagaggttctcaagctcaagcttgacaactactctggcgctgggttcgggtcgaagagcaagtacatgttcggcaaagttaccatccagatcaagctcgtcgagggcgactcggctgggaccgtcactgctttctacatgtcgtcggatggaccgaaccacaacgaattcgacttcgagttcctgggcaacacgacaggggagccctacctggtacagaccaacgtgtacgtgaacggggtgggcaaccgggag

SEQ ID NO: 699 - DNA, 347 bp, Eucalyptus grandis
ccgcgcagtagtcgtagatcatgaagtacttctggacccacctgagccgcctccggccataggcatcgagctcattgattttccatgtggatccagagtaggaagcgggccgtccgatctcacaggaggacgagcccgtggaccaggtgcaggcagtggcctggaacttcctgtagtatgccgtgaagggcgctttcgaccagtctgtcttgatcagtccgcctctcgtggcccaatcatcggcattccagaggctcgagtatattttcatgggctggttcttggggaagggcacgccaattgactctccattcttgaaaactctaataggaatgttgtctaccaag

SEQ ID NO: 700 - DNA, 452 bp, Eucalyptus grandis; identical to SEQ ID NO: 690

SEQ ID NO: 701 - DNA, 323 bp, Eucalyptus grandis
gtcgccgggcactcgcacgcgtcgatctcgaagttacggtaggacgtgatgaagggggcgtgggtccagtcggtcttgatgcggccgccctgggtggcccagtcgtcggcgttccatatcgagctgtagacgcccatgggctggtccttcgggtacgggatgccccggtgctccaagttggtgtgcacgcggatcggtgtctcgtccacaagaaacacgacttggcgctggtccagaggacggagtaggagtggaagtcagtggtggggtcgaaccagaggccgagcctctgctcccggttgcccaccccgttcacgtacacg

SEQ ID NO: 702 - DNA, 441 bp, Eucalyptus grandis
cgcctccggccataggcatcgagctcattgattttccatgtggatccagagtaggaagcgggccgtccgatctcacaggaggacgagcccgtggaccaggtgcaggcagtggcctggaacttcctgtagtatgccgtgaagggcgctttcgaccagtctgtcttgatcagtccgcctctcgtggcccaatcatcggcattccagaggctcgagtatattttcatgggctggttcttggggaagggcacgccaattgactctccattcttgaaaactctaataggaatgttgtctaccaagaagatgatgtgctggggcttccagatgacggagtatgtgtggaaatttctggtggggtcaaaccacagtagaactgctgctccctgttgcccttcccttgagtgaagacgttggtgtggaggatgtaagggtcgccgctca

SEQ ID NO: 703 - DNA, 345 bp, Eucalyptus grandis
aggacgtgatgaagggggcgtgggtccagtcggtcttgatgcggccgccctgggtggcccagtcgtcggcgttccatatcgagctgtagacgcccatgggctggtccttcgggtacgggatgccccggtgctccaagttggtgtgcacgcggatcggtgtctcgtccacaagaaacacgacttggcgctggttccagaggacggagtaggagtggaagtcagtggtggggtcgaaccagaggccgagcctctgctcccggttgcccaccccgttcacgtacacgttggtctgtaccaggtagggctcccctgtcgtgttgcccaggaactcgaagtcgaattcgt

SEQ ID NO: 704 - DNA, 339 bp, Eucalyptus grandis
  misc_feature (1)...(339): n = A,T,C or G
gtcgccgggcactcgcacgcgtcgatctcgaagttacggtaggacgtgatgaagggggcgtgggtccagtcggtcttgatgcggccgccctgggtggcccagtcgtcggcgttccatatcgagctgtagacgcccatgggctggtccttcgggtacgggatgccccggtgctcaagttggtgtgcacgcggatcggtgtctcgtccacaagaaacacgacttggcgctggttccagaggacggagtaggagtggaagtcagtggtggggtcgaaccanaggccgaacctctgcttccggttgcccaccccgtcacgtacacgttggtctttaccaagta

SEQ ID NO: 705 - DNA, 471 bp, Eucalyptus grandis
gtcgccgggcactcgcacgcgtcgatctcgaagttacggtaggacgtgatgaagggggcgtgggtccagtcggtcttgatgcggccgccctgggtggcccagtcgtcggcgttccatatcgagctgtagacgcccatgggctggtccttcgggtacgggatgccccggtgctccaagttggtgtgcacgcggatcggtgtctcgtccacaagaaacacgacttggcgctggttccagaggacggagtaggagtggaagtcagtggtggggtcgaaccagaggccgagcctctgctcccggttgcccaccccgttcacgtacacgttggtctgtaccaggtagggctcccctgtcgtgttgcccaggaactcgaagtcgaattcgttgtggttcggtccatccgacgacatgtagaaagcagtgacggtcccagccgagtcgccctcgacgagcttgatctggatggtaact

SEQ ID NO: 706 - DNA, 484 bp, Eucalyptus grandis
ccgcgcagtagtcgtagatcatgaagtacttctggacccacctgagccgcctccggccataggcatcgagctcattgattttccatgtggatccagagtaggaagcgggccgtccgatctcacaggaggacgagcccgtggaccaggtgcaggcagtggcctggaacttcctgtagtatgccgtgaagggcgctttcgaccagtctgtcttgatcagtccgcctctcgtggcccaatcatcggcattccagaggctcgagtatattttcatgggctggttcttggggaagggcacgccaattgactctccattcttgaaaactctaataggaatgttgtctaccaagaagatgatgtgctggggcttccagatgacggagtatgtgtggaaatttctggtggggtcaaaccacaggtagaactgctgctccctgttgcccttcccttgagtgaagacgttggtgtggaggatgtaagggtcgcc

SEQ ID NO: 707 - DNA, 317 bp, Eucalyptus grandis
  misc_feature (1)...(317): n = A,T,C or G
cgggtacgggatgccccggtgctccaagttggtgtgcacgcggatcggtgtctcgtccacaagaaacacgacttggcgctggttccagaggacggagtaggagtggaagtcagtggtggggtcgaaccagaggccgagcctctgctcccggttgcccaccccgttcacgtacacgttggtctgtaccaggtagggctcccctgtcgtgttgcccaggaactcgaagtcgaattcgttgtggttcggtccatccgacgacatgtagaaagcagtgacggtcccagccgagtcgccctcnacgagcttgatctggatgg

SEQ ID NO: 708 - DNA, 367 bp, Eucalyptus grandis
ggccgtccgatctcgcaggacgacgagcccgtggaccaggtgcaggcagtggcctggaacttcctgtagtatgccgtgaagggcgctttcgaccagtccgtcttgatcagtccgcctctcgtggcccaatcatcggcattccagaggctcgagtatatcttcatgggctggctcttggggaagggcacgccaattgactctgcattcttgaaaactctgataggaatgttgtctaccaagaagatgatgtgctggggcttccagatgacggagtatgtgtggaaatttctggtggggtcaaaccacaggtagaactgctgctccctgttgcccttcccttgagtgaagacgttggtgtggaggatgt

SEQ ID NO: 709 - DNA, 384 bp, Eucalyptus grandis
gtcgccgggcactcgcacgcgtcgatctcgaagttacggtaggacgtgatgaagggggcgtgggtccagtcggtcttgatgcggccgccctgggtggcccagtcgtcggcgttccatatcgagctgtaaacgcccatgggctggtccttcgggtacgggatgccccggtgctccaagttggtgtgcacgcggatcggtgtctcgtccacaagaaacacgacttggcgctggttccagaggacggagtaggagtggaagtcagtggtggggtcgaaccagaggccgagcctctgctcccggttgcccaccccgttcacgtacacgttggtctgtaccaggtagggctcccctgtcgtgttgcccaggaactcgaagtcgaattcg

SEQ ID NO: 710 - DNA, 364 bp, Eucalyptus grandis
gtcgccgggcactcgcacgcgtcgatctcgaagttacggtaggacgtgatgaagggggcgtgggtccagtcggtcttgatgcggccgccctgggtggcccagtcgtcggcgttccatatcgagctgtagacgcccatgggctggtccttcgggtacgggatgccccggtgctccaagttggtgtgcacgcggatcggtgtctcgtccacaagaaacacgacttggcgctggttccagaggacggagtaggagtggaagtcagtggtggggtcgaaccagaggccgagcctctgctcccggttgcccaccccgttcacgtacacgttggtctgtaccaggtagggctcccctgtcgtgttgccca

SEQ ID NO: 711 - DNA, 338 bp, Eucalyptus grandis
gtcgccgggcactcgcacgcgtcgatctcgaagttacggtaggacgtgatgaagggggcgtgggtccagtcggtcttgatgcggccgccctgggtggcccagtcgtcggcgttccatatcgagctgtagacgcccatgggctggtccttcgggtacgggatgccccggtgctccaagttggtgtgcacgcggatcggtgtctcgtccacaagaaacacgacttggcgctggttccagaggacggagtaggagtggaagtcagtggtggggtcgaaccagaggccgagcctctgctcccggttgcccaccccgttcacgtacacgttggtctgtaccag

SEQ ID NO: 712 - DNA, 216 bp, Eucalyptus grandis
  misc_feature (1)...(216): n = A,T,C or G
ggcccaatcatcggcattccagaggctcgagtatattttcatgggctggttcttggggaagggcacgccaattnnctctccattcttgaaaactctaataggaatgttgtctaccaagaagatgatgtgctggggcttccagatgacggagtatgtgtggaaatttctggtggggtcaaaccacaggtagaactgctgctccctgttgcccttccc

SEQ ID NO: 713 - DNA, 341 bp, Eucalyptus grandis
gtcgccgggcactcgcacgcgtcgatctcgaagttacggtaggacgtgatgaagggggcgtgggtccagtcggtcttgatgcggccgccctgggtggcccagtcgtcggcgttccatatcgagctgtagacgcccatgggctggtccttcgggtacgggatgccccggtgctccaagttggtgtgcacgcggatcggtgtctcgtccacaagaaacacgacttggcgctggttccagaggacggagtaggagtggaagtcagtggtggggtcgaaccagaggccgagcctctgctcccggttgcccaccccgttcacgtacacgttggtctgtaccaggta

SEQ ID NO: 714 - DNA, 413 bp, Eucalyptus grandis
gtcgccgggcactcgcacgcgtcgatctcgaagttacggtaggacgtgatgaagggggcgtgggtccagtcggtcttgatgcggccgccctgggtggcccagtcgtcggcgttccatatcgagctgtagacgcccatgggctggtccttcgggtacgggatgccccggtgctccaagttggtgtgcacgcggatcggtgtctcgtccacaagaaacacgacttggcgctggttccagaggacggagtaggagtggaagtcagtggtggggtcgaaccagaggccgagcctctgctcccggttgcccaccccgttcacgtacacgttggtctgtaccaggtagggctcccctgtcgtgttgcccaggaactcgaagtcgaattcgttgtggttcggtccatccgacgacatgta

SEQ ID NO: 715 - DNA, 280 bp, Eucalyptus grandis
  misc_feature (1)...(280): n = A,T,C or G
tctggtcgcgggtgcgaggtttgaggagctctaccagccgggctgggctatggaccattttgtctacnaaggagaggttctcaagctcaagcttgacaactactctggcgctgggttcgggtcgaagagcaagtacatgttcggcaaagataccatccagatcaagctcgtcgagggcgactcggctgggaccgncactgctttctacatgtcgtcggatggaccgaaccacaacgaattcgacttcgagttcctgggcaacacgacaggggagccctac

SEQ ID NO: 716 - DNA, 397 bp, Eucalyptus grandis
ccgcgcagtagtcgtagatcatgaagtacttctggacccacctgagccgcctccggccataggcatcgagctcattgattttccatgtggatccagagtaggaagcgggccgtccgatctcacaggaggacgagcccgtggaccaggtgcaggcagtggcctggaacttcctgtagtatgccgtgaagggcgctttcgaccagtctgtcttgatcagtccgcctctcgtggcccaatcatcggcattccagaggctcgagtatattttcatgggctggttcttggggaagggcacgccaattgactctccattcttgaaaactctaataggaatgttgtctaccaagaagatgatgtgctggggcttccagatgacggagtatgtgtggaaatttct

SEQ ID NO: 717 - DNA, 365 bp, Eucalyptus grandis
ggccgtccgatctcgcaggacgacgagcccgtggaccaggtgcaggcagtggcctggaacttcctgtagtatgccgtgaagggcgctttcgaccagtccgtcttgatcagtccgcctctcgtggcccaatcatcggcattccagaggctcgagtatatcttcatgggctggctcttggggaagggcacgccaattgactctgcattcttgaaaactctgataggaatgttgtctaccaagaagatgatgtgctggggcttccagatgacggagtatgtgtggaaatttctggtggggtcaaaccacaggtagaactgctgctccctgttgcccttcccttgagtgaagacgttggtgtggaggat

SEQ ID NO: 718 - DNA, 301 bp, Eucalyptus grandis
cgcctccggccataggcatcgagctcattgattttccatgtggatccagagtaggaagcgggccgtccgatctcacaggaggacgagcccgtggaccaggtgcaggcagtggcctggaacttcctgtagtatgccgtgaagggcgctttcgaccagtctgtcttgatcagtccgcctctcgtggcccaatcatcggcattccagaggctcgagtatattttcatgggctggttcttggggaagggcacgccaattgactctccattcttgaaaactctaataggaatgttgtctaccaaga

SEQ ID NO: 719 - DNA, 383 bp, Eucalyptus grandis
cgcctccggccataggcatcgagctcattgattttccatgtggatccagagtaggaagcgggccgtccgatctcacaggaggacgagcccgtggaccaggtgcaggcagtggcctggaacttcctgtagtatgccgtgaagggcgctttcgaccagtctgtcttgatcagtccgcctctcgtggcccaatcatcggcattccagaggctcgagtatattttcatgggctggttcttggggaagggcacgccaattgactctccattcttgaaaactctaataggaatgttgtctaccaagaagatgatgtgctggggcttccagatgacggagtatgtgtggaaatttctggtggggtcaaaccacaggtagaactgctgctc

SEQ ID NO: 720 - DNA, 370 bp, Eucalyptus grandis
cgacagagtgtcggggtcgggcttccggtccaagaaggagtacctgttcggccggatcgacatgcagctcaagctcgtcgccgggaactccgccggcaccgtgaccgcttactacttgtcttcgcaagggccaactcacgatgagattgacttcgagttcctggggaacctgagcggcgacccttacatcctccacaccaacgtcttcactcaagggaagggcaacagggagcagcagttctacctgtggtttgaccccaccagaaatttccacacatactccgtcatctggaagccccagcacatcatcttcttggtagacaacattcctattagagttttcaagaatggagagtcaattggcgtgccc

SEQ ID NO: 721 - DNA, 413 bp, Eucalyptus grandis
ggcggccgaggaagaagggcaagtggaggctccgttggaccagacgcaagcgctcgcgttgaagccgctgaaggaggcggtgaaaggcgcctgcgaccagtcagtcttcacgaggccgccccgggtggcccagtcctcagcgtcccatagggtcgagtagagggtcatgggctggctctttgggtaggggacccccgccgcatccaagttcttgaactcccttattggaatcccatcgacaaagtacctgttttttttagcagaaagagatccgtcattcattatgtggcgaaggacctcaaatcggtgttattttagaaggaaatttatttgttcaaaggttttcatgatcaggacgaggagtacttacacgacgtgtaaagggttccaaaggacggagtaagtgtggaaat

SEQ ID NO: 722 - DNA, 393 bp, Eucalyptus grandis
ttacattcggacgggtcgacctgggatgagatagacttggagttcttggggaacttgagcggcgacccttatatcctccacaccaacttgtacagccaaggcaaaggcaatagggagcagcaattctatctctggttcgacccgacagctgatttccacacttactccgtcctttggaaccctttacacgtcgtgtactttgtcgatgggattccaataagggagttcaagaacttggatgcggcgggggtcccctacccaaagagccagcccatgaccctctactcgaccctatgggacgctgaggactgggccacccggggcggcctcgtgaagactgactggtcgcaggcgcctttcaccgcctccttcagcggcttcaacgcgagcgct

SEQ ID NO: 723 - DNA, 244 bp, Eucalyptus grandis
gcaatagggagcagcaattctatctctggttcgacccgacagctgatttccacacttactccgtcctttggaaccctttacacgtcgtgtactttgtcgatgggattccaataagggagttcaagaacttggatgcggcgggggtcccctacccaaagagccagcccatgaccctctactcgaccctatgggacgctgaggactgggccacccggggcggcctcgtgaagactgactggtcgca

SEQ ID NO: 724 - DNA, 238 bp, Eucalyptus grandis
gacgagacaccgatccgcgtgcacaccaacttggagcaccggggcatcccgtacccgaaggaccagcccatgggcgtctacagctcgatatggaacgccgacgactgggccacccagggcggccgcatcaagaccgactggacccacgcccccttcatcacgtcctaccgtaacttcgagatcgacgcgtgcgagtgcccggcgaccatggcggcggcagacaacgccaagcggtgca

SEQ ID NO: 725 - DNA, 453 bp, Eucalyptus grandis
tggtggcggccgcggcggcctccggcaacttcaacaaggacttcgacatcacgtggggtgatggccgtgcgcagatacccagcagtggccagctcctcacgctgtccctggacaagacgtcggggtcgggcttccggtccaagaagcagtacttgttcgggaagattgacatgcagctcaaactcgtgcctgggaactccgccggcaccgtcaccgcttattacctttcttctttgggttctgcgcacgacgaaatcgacttcgagtttctcggtaacctgagcggcgacccgtacaccctccatacgaacgtgttcacgcaaggaaaaggaaacagagaacaacagttccatctctggttcgaccccaccaaggacttccacacctactccatcctgtggaaccctcaaagcatcatcttctctgtcgatggaacgcccataagagagttca

SEQ ID NO: 726 - DNA, 334 bp, Eucalyptus grandis
gccgatccgggtgttcaagaacagcaaggaccttggggtgaaattccccttcaaccagccgatgaaattgtactccagcctgtggaatgcggatgactgggccactcggggagggcttgagaagaccgactggtccaaggcgccgttcgtggcctcttaccgggggttccacatcgacgggtgcgaagcgtcggttgaggccaagttctgcgctactcagggccagaggtggtgggaccagaaggagttccaggacctcgatgccttccagtaccggaggctccggtgggtgcgctcgaaatacaccatctacaactactgcgctgtcggaaga

SEQ ID NO: 727 - DNA, 416 bp, Eucalyptus grandis
accgtcaccgcatactatttatcttcaaacgggtcggcgtgggatgagatagacttcgagttcttggggaacttgagcggcgatccatacattctccacaccaacgtcttcagccaaggcaagggtaaccgagagcagcaattctatctctggttcgacccaactgctgatttccacacctactccatcctctggaatccacaacgcatcatgtaagagtctgaaaagctcaaaatgcgaccttacttgcatttacattgcgctacactattctctgcggcatttactcaaatacctttgtttgcgatcattgcagattctcagtggacgggactcccatcagagagttcaagaacgcagagtccatcggtgttcctttcccaaggcccagcccatgaggatattcttcgagccct

SEQ ID NO: 728 - DNA, 375 bp, Eucalyptus grandis
acaaaacgcgcccaatatggcctctcgttccacttcttcgctttgtagagctgcgcttcttctcatggtcgtttcttgggcgacttctgcttccgcccgcaacttctatcaagacttcgacataacctggggagatggccgaggtcagatcctcaacaatggcgacctcctcactctctcccttgacaaggcctccggctccggcttccagtccaagaacgagtacttgttcggcaagattgacatgcagctcaaacttgttcctggcaactctgctggcaccgtcaccgcatactatttatcttcaaatgggtcgacgtgggacgagatagatttcgagttcttggggaatttaagtggcgatccgtacattct

SEQ ID NO: 729 - DNA, 538 bp, Eucalyptus grandis
agaaggagtacctgttcggccggatcgacatgcagctcaagctcgtcgccgggaactccgccggcaccgtgaccgcttactacttgtcttcgcaagggccaactcacgatgagattgacttcgagttcctggggaacctgagcggcgacccttacatcctccacaccaacgtcttcactcaagggaagggcaacagggagcagcagttctacctgtggtttgaccccaccagaaatttccacacatactccgtcatctggaagccccagcacatcatcttcttggtagacaacattcctattagagttttcaagaatggagagtcaattggcgtgcccttccccaagaaccagcccatgaaaatatactcgagcctctggaatgccgatgattgggccacgagaggcggactgatcaagacagactggtcgaaatcgcccttcacggcatactacaggaagttccaggccactgcctgcacctggtccacgggctcgtcctcctgtgagatcggacggcccgcttcctactctggatc

SEQ ID NO: 730 - DNA, 412 bp, Eucalyptus grandis
ccggatcgacatgcagctcaagctcgttgccgggaactccgccggcaccgtgaccgcttactacttgtcttcgcaagggccaactcacgacgagatcgacttcgagttcctggggaacctgagcggcgacccttacatcctccacaccaacgtcttcactcaagggaagggcaacagggagcagcagttctacctgtggtttgaccccaccaggaatttccacacatactccgtcatctggaagccccagcacatcatcttcttggtagacaacattcctattagagttttcaagaatggagagtcaattggcgtgcccttccccaagaaccagcccatgaaaatatactcgagcctctggaatgccgatgattgggccacgagaggcggctgatcaagacagactggtcga

SEQ ID NO: 731 - DNA, 350 bp, Eucalyptus grandis
acaccgatccgcgtgcacaccaacttggagcaccggggcatcccgtacccgaaggaccagcccatgggcgtctacagctcgatatggaacgccgacgactgggccacccagggcggccgcatcaagaccgactggacccacgcccccttcatcacgtcctaccgtaacttcgagatcgacgcgtgcgagtgcccggcgaccatggcggcggcagacaacgccaagcggtgcagcagcgccggcagggagaggcggtactggtgggacgagcccacggtgtccgagctgagcctccaccagaaccaccagctcaagtgggtccaggcccaccacatggtctacgactactg

SEQ ID NO: 732 - DNA, 354 bp, Eucalyptus grandis
ctcctgtcgctgtccctcgacagagtgtcggggtcgggcttccggtccaagaaggagtacctgttcggccggatcgacatgcagctcaagctcgtcgccgggaactccgccggcaccgtgaccgcttactacttgtcttcgcaagggccaactcacgatgagattgacttcgagttcctggggaacctgagcggcgacccttacatcctccacaccaacgtcttcactcaagggaagggcaacagggagcagcagttctacctgtggtttgaccccaccagaaatttccacacatactccgtcatctggaagccccagcacatcatcttcttggtagcaacattcctattagag

SEQ ID NO: 733 - DNA, 480 bp, Eucalyptus grandis
cccacatctctccctcctcttcagtcctcactctcatatcatctttgcttctcttcagcaactacagcagcagcagaaagacagacagaacacgcccaatatggccttcccttctacttcctcactttgcatcactacactgcttctcgtggtcgtttcttgggcgacgtctgcttccgcccgcaacttctatcaagacttcgacataacctggggtgatggccgagctcagatcctcaacaacggcgacctcctcactctctcccttgacaaggcctccggctctggcttccagtccaagaacgagtacttgttcggcaagattgacatgcagctcaagctcgttcccggcaactccgcaggcactgtcaccgcatactatttatcttcaaatgggtcgacgtgggacgagatagacttcgagttcttggggaacttgagcggcgatccatacattcttcacaccaacgtgttcagcca

SEQ ID NO: 734 - DNA, 343 bp, Eucalyptus grandis
ccgcgtcaaggtactggataacggccagctcgtcaccctttccctggacaaggcctctggctccggcttcaagtccaagaaccagtacctctatggcaaattcgacatgcaaatcaagctcgtccccggcaactccgcgggcactgtcaccaccttatacttacattcggacgggtcgacctgggatgagatagacttggagttcttggggaacttgagcggcgacccttatatcctccacaccaacttgtacagccaaggcaaaggcaatagggagcagcaattctatctctggttcgacccgacagctgatttccacacttactccgtcctttggaaccct

SEQ ID NO: 735 - DNA, 359 bp, Eucalyptus grandis
atccaaggggtcttacctgttcgggcatttcagcatggacatcaagttggttgctggagattctgcagggacagtcactgcattctacctctcatctcaaaactcagagcacgacgaaatagactttgagttcttgggtaacaggagtgggcagccgtacatagtgcagaccaatgtgttcacgggaggaaaaggagacagagaacagaggatttatctttggttcgatcccaccgccgcctaccactcctactctgttctctggaacatgtaccagattgtattcttcgtggatgacgtgccgatccgggtgttcaagaacagcaaggaccttggggtgaaattccccttcaaccagc

SEQ ID NO: 736 - DNA, 360 bp, Eucalyptus grandis
gcatactatttatcttcaaatgggtcaacgtgggacgagatagacttcgagttcttggggaacttgagcggcgatccctacattcttcacaccaacgtgttcagccaaggcaagggcaaccgagagcagcaattctatctctggttcgacccaactgctgatttccacacctactccatcctctggaatccacaacgcatcatattctcagtggacgggactccgatcagagagttcaagaacgcagagtccatcggtgttcctttccccaaggcccagcccatgaggatattctcgagcctctggaacgcagacgactgggcgaccagaggcggcctagtgaagacggacttggacgca

SEQ ID NO: 737 - DNA, 437 bp, Eucalyptus grandis
gcgacttcagagctcgtgaagaaaagcttttgctctcgctcttcttcttcttcttcttcaatggctgtcctggtcttttccaaagtgtctgtgtcgttcggcctgttcgtgggtcttgcgttgttggtgggtctggtcgcgggtgcgaggtttgaggagctctaccagccgggctgggctatggaccattttgtctacgaaggagaggttctcaagctcaagcttgacaactactctggcgctgggttcgggtcgaagagcaagtacatgttcggcaaagttaccatccagatcaagctcgtcgagggcgactcggctgggaccgtcactgctttctacatgtcgtcggatggaccgaaccacaacgaattcgacttcgagttcctgggcaacacgacaggggagccctacctggtacagaccacgtgtccgtgacg

SEQ ID NO: 738 - DNA, 341 bp, Eucalyptus grandis
ggcgacccttacatcctccacaccaacgtcttcactcaagggaagggcaacagggagcagcagttctacctgtggtttgaccccaccaggaatttccacacatactccgtcatctggaagccccagcacatcatcttcttggtagacaacattcctattagagttttcaagaatggagagtcaattggcgtgcccttccccaagaaccagcccatgaaaatatactcgagcctctggaatgccgatgattgggccacgagaggcggactgatcaagacagactggtcgaaagcgcccttcacggcatactacaggaagttccaggccactgcctgcacctg

SEQ ID NO: 739 - DNA, 497 bp, Eucalyptus grandis
  misc_feature (1)...(497): n = A,T,C or G
gagcttgctgctgatggctgccgnttcgcccgcagctgggaacttctaccaggacttcgacctgacgtggggtggcagcgaccgcgccaagatcttcagcgggggtcagctcctgtcgctgtccctcgacagagtgtcggggtcgggcttccggtccaagaaggagtacctgttcggccggatcgacatgcagctcaagctcgttgccgggaactccgccggcaccgtgaccgcttactacttgtcttcgcaagggccaactcacgacgagatcgacttcgagttcctggggaacctgagcggcgacccttacatcctccacaccaacgtcttcactcaagggaagggcaacagggagcagcagttctacctgtggtttgaccccaccaggaatttccacacatactccgtcatctggaagccccagcacatcatcttcttggtagacaacattcctattagagttttcaagaatggagagtcaattggcgtgccct

SEQ ID NO: 740 - DNA, 497 bp, Eucalyptus grandis
ccaagaaggagtacctgttcggccggatcgacatgcagctcaagctcgtcgccgggaactccgccggcaccgtgaccgcttactacttgtcttcgcaagggccaactcacgatgagattgacttcgagttcctggggaacctgagcggcgacccttacatcctccacaccaacgtcttcactcaagggaagggcaacagggagcagcagttctacctgtggtttgaccccaccagaaatttccacacatactccgtcatctggaagccccagcacatcatcttcttggtagacaacattcctattagagttttcaagaatggagagtcaattggcgtgcccttccccaagaaccagcccatgaaaatatactcgagcctctggaatgccgatgattgggccacgagaggcggactgatcaagacagactggtcgaaatcgccttacggatactacagaagttcaggccactgctgacctggccacgggctgtctctg

SEQ ID NO: 741 - DNA, 395 bp, Eucalyptus grandis
cgcaacttttatcaagactttttcataacctgggggagatggccgagctcagatcctcaacaatggcgacctcctcactctctcccttgacaaggcctccggctccggcttccagtccaagaacgagtacttgttcggcaagattgacatgcagctcaagctcgttcctggcaactccgcaggcactgtcaccgcatactatttatcttcaaatgggtcaacgtgggacgagattgacttcgagttcttggggaacttgagcggcgatccctacattcttcacaccaacgtgttcagccaaggcaagggcaaccgagagcagcaattctatctctggttcgacccaactgctgatttccacacctactccatcctctggaatccacaacgcatta

SEQ ID NO: 742 - DNA, 396 bp, Eucalyptus grandis
ggcggccgaggaagaagggcaagtggaggctccgttggaccagacgcaagcgctcgcgttgaagccgctgaaggaggcggtgaaaggcgcctgcgaccagtcagtcttcacgaggccgccccgggtggcccagtcctcagcgtcccatagggtcgagtagagggtcatgggctggctctttgggtaggggacccccgccgcatccaagttcttgaactcccttattggaatcccatcgacaaagtacctgttttttttagcagaaagagatccgtcattcattatgtggcgaaggacctcaaatcggtgttattttagaaggaaatttatttgtcaaaggttttcatgatcaggacgaggagtacttacacgacgtgtaaagggttccaaaggacg

SEQ ID NO: 743 - DNA, 347 bp, Eucalyptus grandis
caccaccttatacttacattcggacgggtcgacctgggatgagatagacttggagttcttggggaacttgagcggcgacccttatatcctccacaccaacttgtacagccaaggcaaaggcaatagggagcagcaattctatctctggttcgacccgacagctgatttccacacttactccgtcctttggaaccctttacacgtcgtgtactttgtcgatgggattccaataagggagttcaagaacttggatgcggcgggggtcccctacccaaagagccagcccatgaccctctactcgaccctatgggacgctgaggactgggccacccggggcggcctcgtga

SEQ ID NO: 744 - DNA, 446 bp, Eucalyptus grandis
gtcaaggtactggataacggccagctcgtcaccctttccctggacaaggcctctggctccggcttcaagtccaagaaccagtacctctatggcaaattcgacatgcaaatcaagctcgtccccggcaactccgcgggcactgtcaccaccttatacttacattcggacgggtcgacctgggatgagatagacttggagttcttggggaacttgagcggcgacccttatatcctccacaccaacttgtacagccaaggcaaaggcaatagggagcagcaattctatctctggttcgacccgacagctgatttccacacttactccgtcctttggaaccctttacacgtcgtgtactttgtcgatgggattccaataagggagttcaagaacttggatgcggcgggggtcccctacccaaagagccagcccatgaccctctactcgac

SEQ ID NO: 745 - DNA, 439 bp, Eucalyptus grandis
  misc_feature (1)...(439): n = A,T,C or G
ccagtctctctcccccactctttctcaagccaaaatataagccaaagtataagccaaagtatagagcaatcatggcccatgaaggtggaggtcctagtgcttcctccatggtggtgctcgtgagcttgctgctgatggctgccgcttcgcccgcagctgggaacttctaccaggacttcgacctgacgtggggtggcagcgaccgggccaagatcttcagcgggggtcagctcctgtcgctgtccctcgacagagtgtcggggtcgggcttccggtccaagaaggagtacctgttcggccggatcgacatgcagctcaagctcgtcgccgggaactccgccggcaccgtgaccgcttactacttgtcttcgcaagggccaactcacgatgagattgacttcgagttcctggggaacctgagcggngacccttacatcct

SEQ ID NO: 746 - DNA, 322 bp, Eucalyptus grandis
  misc_feature (1)...(322): n = A,T,C or G
acgacgagatcgacttcgagttcctggggaacctgagcggcgacccttacatnctccacaccaacgtcttcactcaagggaagggcaacagggagcagcagttctacctgtggtttgaccccaccaggaatttccacacatactccgtcatctggaagccccagcacatcatcttcttggtagacaacattcctattagagttttcaagaatggagagtcaattggcgtgcccttccccaagaaccagcccatgaaaatatactcgagcctctggaatgccgatgattgggccacgagaggcggactgatcaagacagactg

SEQ ID NO: 747 - DNA, 433 bp, Eucalyptus grandis
tggacaaggcctctggctccggcttcaagtccaagaaccagtacctctatggcaaattcgacacgcaaatcaagctcgtccccggcaactccgcgggcactgtcaccaccttatacttacattcggacgggtcgacctgggacgagatagacttggagttcttggggaacttgagcggcgacccttatatcctccacaccaacttgtacagccaaggcaaaggcaatagggagcagcaattctatctctggttcgacccgacagctgatttccacacttactccgtcctttggaaccctttacacgtcgtgtactttgtcgatgggattccaataagggagttcaagaacttggatgcggcgggggtcccctacccaaagagccagcccatgaccctctactcgaccctatgggacgctgaggactgggccac

SEQ ID NO: 748 - DNA, 525 bp, Eucalyptus grandis
  misc_feature (1)...(525): n = A,T,C or G
aacagagcgacttcagagctcgtgaagaaaagcttttgctctcgctcttcttcttcttcttcttcttcaatggctgtcccggtcttttccaaagtgtctgtgtcgttcggcctgttcgtgggtcttgcgttgttggtgggtctggtcgcgggtgcgaggtttgaggagctctaccagccgggctgggctatggaccattttgtctacgaaggagaggttctcaagctcaagcttgacaactactctggcgctgggttcgggtcgaagagcaagtacatgttcggcaaagttaccatccagatcaagctcgtcgagggcgactcggctgggaccgncactgccttctacatgtcgtcggatggaccgaaccacaacgaattcgacttcgagttcctgggcaacacgacaggggagccctacctggtacagaccaacgtgtacgtgaacggggtgggcaaccgggagcagaggctcggcctctggttcgaccccaccactgacttccactcctactccgtcctctgg

SEQ ID NO: 749 - DNA, 385 bp, Eucalyptus grandis
cgtgagcttgctgctgatggctgccgcttcgcccgcagctgggaacttctaccaggacttcgacctgacgtggggtggcagcgaccgggccaagatcttcagcgggggtcagctcctgtcgctgtccctcgacagagtgtcggggtcgggcttccggtccaagaaggagtacctgttcggccggatcgacatgcagctcaagctcgtcgccgggaactccgccggcaccgtgaccgcttactacttgtcttcgcaagggccaactcacgacgagatcgacttcgagttcctggggaacctgagcggcgacccttacatcctccacaccaacgtcttcactcaagggaagggcaacagggagcagcagttctacctgtgggttgac

SEQ ID NO: 750 - DNA, 519 bp, Eucalyptus grandis
caaacacccacagctcttcctctctctccctcagtgtctcctcttcagtcctcactctcatatcatctcattggcatttgcatctcttcagcaactacagccgcagcagcagcagcaaaaaacaaaacacgccccatatggcctctcgttccacttcttcgctttgtaccaccgcgcttcttctcctggtcgtttcttgggcagcatccgcttttgcccgcaacttctaccaagacttcgacataacctggggagatggccgagctcagatcctcaatagtggcgacctcctcactctttccctcgacaaggcctccggctccggcttccagtccaagaacgagtacctgtttggcaagattgacatgcaactcaagctcgttcccggcaactccgcaggcaccgtcaccgcttactatttatcttcaaacgggtcgacgtgggacgagatagacttcgagttcttggggaacttgagcggcgatccatacattctccacaccaacgtcttcagccaag

SEQ ID NO: 751 - DNA, 342 bp, Eucalyptus grandis
cgtgagcttgctgctgatggctgccgcttcgcccgcagctgggaacttctaccaggacttcgacctgacgtggggtggcagcgaccgggccaagatcttcagcgggggtcagctcctgtcgctgtccctcgacagagtgtcggggtcgggcttccggtccaagaaggagtacctgttcggccggatcgacatgcagctcaagctcgtcgccgggaactccgccggcaccgtgaccgcttactacttgtcttcgcaagggccaactcacgacgagatcgacttcgagttcctggggaacctgagcggcgacccttacatcctccacaccaacgtcttcactca

SEQ ID NO: 752 - DNA, 416 bp, Eucalyptus grandis
  misc_feature (1)...(416): n = A,T,C or G
gagaaacagagcgacttcagagctcgtgaagaaaagcttttgctctcgctcttcttcttcttcttcttcttcttcaatggctgtcccggtcttttccaaagtgtctgtgtcgttcggcctgttcgtgggtcttgcgttgttggtgggtctggtcgcgggtgcgaggtttgaggagctctaccagccgggctgggctatggaccattttgtctacgaaggagaggttctcaagctcaagcttgacaactactctggcgctgggttcgggtcgaagagcaagtacatgttcggcaaagttaccatccagatcaagctcgtcgagggcgactcggctgggaccgtcactgctttctacatgtcgtcngatggaccgaaccacaacgaattcgacttcgagttcctgggcaacacgaaca

SEQ ID NO: 753 - DNA, 408 bp, Eucalyptus grandis
agcgacttcagagctcgtgaagaaaagcttttgctctcgctcttcttcttcttcttcttcttcttcaatggctgtcccggtcttttccaaagtgtctgtgtcgttcggcctgttcgtgggtcttgcgttgttggtgggtctggtcgcgggtgcgaggtttgaggagctctaccagccgggctgggctatggaccattttgtctacgaaggagaggttctcaagctcaagcttgacaactactctggcgctgggttcgggtcgaagagcaagtacatgttcggcaaagttaccatccagatcaagctcgtcgagggcgactcggctgggaccgtcactgctttctacatgtcgtcggatggaccgaaccacaacgaattcgacttcgagttcctgggcaacacgaacag

SEQ ID NO: 754 - DNA, 401 bp, Eucalyptus grandis
gagaaacagagcgacttcagagctcgtgaagaaaagcttttgctctcgctcttcttcttcttctcttcttcttcaatggctgtcccggtcttttccaaagtgtctgtgtcgttcggcctgttcgtgggtcttgcgttgttggtgggtctggtcgcgggtgcgaggtttgaggagctctaccagccgggctgggctatggaccattttgtctacgaaggagaggttctcaagctcaagcttgacaactactctggcgctgggttcgggtcgaagagcaagtacatgttcggcaaagttaccatccagatcaagctcgtcgagggcgactcggctgggaccgtcactgctttctacatgtcgtcggatggaccgaaccacaacgaattcgacttcgagttctg

SEQ ID NO: 755 - DNA, 403 bp, Eucalyptus grandis
  misc_feature (1)...(403): n = A,T,C or G
gcgacttcagagctcgtgaagaaaagcttttgctctcgctcttcttcttcttcttcttcttcttcaatggctgtcccggtcttttccaaagtgtctgtgtcnttcggcctgttcgtgggtcttgcgttgttggtgggtctggtcgcgggtcaaggtttgaggagctctaccagccgggctgggctatggaccattttgtctacgaaggagaggttctcaagctcaagcttgacaactactctggcgctgggttcgggtcgaagagcaagtacatgttcggcaaagttaccatccagatcaagctcgtcgagggcgactcggctgggaccgtcactgctttctacatgtcgtcggatggaccgaaccacaacgaattcgacttcgagttcctgggcacacgaca

SEQ ID NO: 756 - DNA, 414 bp, Eucalyptus grandis
gagaaacagagcgacttcagagctcgtgaagaaaagcttttgctctcgctcttcttcttcttcttcttcttcttcaatggctgtcccggtcttttccaaagtgtctgtgtcgttcggcctgttcgtgggtcttgcgttgttggtgggtctggtcgcgggtgcgaggtttgaggagctctaccagccgggctgggctatggaccattttgtctacgaaggagaggttctcaagctcaagcttgacaactactctggcgctgggttcgggtcgaagagcaagtacatgttcggcaaagttaccatccagatcaagctcgtcgagggcgactcggctgggaccgtcactgctttctacatgtcgtcggatggaccgaaccacaacgaattcgacttcgagttcctggcaacacgaca

SEQ ID NO: 757 - DNA, 441 bp, Eucalyptus grandis
tgaaaatatactcgagcctctggaatgccgatgattgggccacgagaggcggactgatcaagacagactggtcgaaagcgcccttcacggcatactacaggaagttccaggccaccgcctgcacctggtccacgggctcgtcgtcctgcgagatcggacggcccgcttcctactctggatccacatggaaaatcaatgagctcgatgcctatggccggaggcggctcaggtgggtccagaagtacttcatgatctacgactactgcgcggacggcaagaggttccctcaaggcatcccagccgaatgcaagcgctcgcgattctagaaaagaaaaagagggaaatcaacgtgttcgaatggaaggtcgctcggcagtatatagttaatgcattctttcgtttcgtttcgcatgttcaagtcatgacttgctcgtggtgtct

SEQ ID NO: 758 - DNA, 499 bp, Eucalyptus grandis
gcgacttcagagctcgtgaagaaaagcttttgctctcgctcttcttcttcttcttcttcttcttcaatggctgtcccggtcttttccaaagtgtctgtgtcgttcggcctgttcgtgggtcttgcgttgttggtgggtctggtcgcgggtgcgaggtttgaggagctctaccagccgggctgggctatggaccattttgtctacgaaggagaggttctcaagctcaagcttgacaactactctggcgctgggttcgggtcgaagagcaagtacatgttcggcaaagttaccatccagatcaagctcgtcgagggcgactcggctgggaccgtcactgctttctacatgtcgtcggatggaccgaaccacaacgaattcgacttcgagttcctgggcaacacgacaggggagccctacctggtacagaccaacgtgtacgtgaacggggtgggcaaccgggaacagaggctcggcctctggttcgaccccaccactgact

SEQ ID NO: 759 - DNA, 340 bp, Eucalyptus grandis
gttggcagggaagagagatatggcctctggttcgatccttccgatgacttccatcagtacggcatcctgtggaccgactctcaaatcatattttatgtggacaatgtacccatcagagagtttaagagaacggaggctatgggaggccaattcccctctaaacctatgtctttatacgccacaatctgggatggctctgattgggccacaaatggcggaaaataccgagtgaactacaagtacgccccctacgtcgccaagttctctgatcttgtcctgcacggctgcgcagttgacccgattgagcaccaattaagctgcaacgatgtcccaagtcata

SEQ ID NO: 760 - DNA, 350 bp, Eucalyptus grandis
  misc_feature (1)...(350): n = A,T,C or G
tcttggtagacaacattcctattagagttttcaagaatggagagtcaattggcgtgcccttccccaagaaccagcccatgaaaatatactcgagcctctggaatgccgatgattgggccacgagaggcggactgatcaagacagactggtcgaaagcgcccttcacggcatactacaggaagttccaggccaccgcctgcacctggtccacgggctcgtcgtcctgcgagatcggacggcccgcttcctactctggatccacatggaaaatcaatgagctcgatgcctatggccggaggcggctcangtgggtccagaagtacttcatgatctacgactactgcgcggac

SEQ ID NO: 761 - DNA, 288 bp, Eucalyptus grandis
cttgtggacgagacaccgatccgcgtgcacaccaacttggagcaccggggcatcccgtacccgaaggaccagcccatgggcgtctacagctcgatatggaacgccgacgactgggccacccagggcggccgcatcaagaccgactggacccacgcccccttcatcacgtcctaccgtaacttcgagatcgacgcgtgcgagtgcccggcgaccatggcggcggcagacaacgccaagcggtgcagcagcgccggcagggagaggcggtactggtgggacgagcccacg

SEQ ID NO: 762 - DNA, 364 bp, Eucalyptus grandis
ttgacttcgagttcctggggaacctgagcggcgacccttacatcctccacaccaacgtcttcactcaagggaagggcaacagggagcagcagttctacctgtggtttgaccccaccagaaatttccacacatactccgtcatctggaagccccagcacatcatcttcttggtagacaacattcctattagagttttcaagaatggagagtcaattggcgtgcccttccccaagaaccagcccatgaaaatatactcgagcctctggaatgccgatgattgggccacgagaggcggactgatcaagacagactggtcgaaatcgcccttcacggcatactacaggaagttccaggccactgcctg

SEQ ID NO: 763 - DNA, 343 bp, Eucalyptus grandis
  misc_feature (1)...(343): n = A,T,C or G
acgacaggggagccctacctggtacagaccaacgtgtacgtgaacggggtgggcaaccgggagcagaggctcggctctggttcgaccccaccactgacttccactcctactccgtcctctggaaccagcgccaagtcgtgtttcttgtggacgagacaccgatccgcgtgcacaccaacttggagcaccggggcatcccgtacccgaaggaccagcccatgggcgtctacagctcgatatggaacgccgacgactgggccacccanggcggccgcatcaagaccgactggacccacgcccccttcatcacgtcctaccgtaacttcgagatcgacgcgtgcga

SEQ ID NO: 764 - DNA, 301 bp, Eucalyptus grandis
cgtcactgctttctacatgtcgtcggatggaccgaaccacaacgaattcgacttcgagttcctgggcaacacgacaggggagccctacctggtacagaccaacgtgtacgtgaacggggtgggcaaccgggagcagaggctcggcctctggttcgaccccaccactgacttccactcctactccgtcctctggaaccagcgccaagtcgtgtttcttgtggacgagacaccgatccgcgtgcacaccaacttggagcaccggggcatcccgtacccgaaggaccagcccatgggcgtctac

SEQ ID NO: 765 - DNA, 516 bp, Eucalyptus grandis
gcgacttcagagctcgtgaagaaaagcttttgctctcgctcttcttcttcttcttcttcttcaatggctgtcccggtcttttccaaagtgtctgtgtcgttcggcctgttcgtgggtcttgcgttgttggtgggtctggtcgcgggtgcgaggtttgaggagctctaccagccgggctgggctatggaccattttgtctacgaaggagaggttctcaagctcaagcttgacaactactctggcgctgggttcgggtcgaagagcaagtacatgttcggcaaagttaccatccagatcaagctcgtcgagggcgactcggctgggaccgtcactgccttctacatgtcgtcggatggaccgaaccacaacgaattcgacttcgagttcctgggcaacacgacaggggagccctacctggtacagaccaacgtgtacgtgaacggggtgggcaaccgggagcagagctcggcctctggttcgaccccaccactgacttcactcctactccgtcctctg

SEQ ID NO: 766 - DNA, 349 bp, Eucalyptus grandis
gtccctcgacagagtgtcggggtcgggcttccggtccaagaaggagtacctgttcggccggatcgacatgcagctcaagctcgtcgccgggaactccgccggcaccgtgaccgcttactacttgtcttcgcaagggccaactcacgatgagattgacttcgagttcctggggaacctgagcggcgacccttacatcctccacaccaacgtcttcactcaagggaagggcaacagggagcagcagttctacctgtggtttgaccccaccagaaatttccacacatactccgtcatctggaagccccagcacatcatcttcttggtagacaacattcctattagagttttc

SEQ ID NO: 767 - DNA, 479 bp, Eucalyptus grandis
gcgggttccaaacgaagcagagataccgattcgggtggttcagcatgaagctcaagctcgtgggaggcgactcggccggagtggtcactgcttactacatgtgttcggagaacggggcagggccggagagggatgagctggacttcgagttcttggggaaccggagcggacagccgtatctgatccagaccaacgtgtacaagaacgggacgggctcgcgcgagatgcggcacatgctctggttcgacccgaccgaggacttccactcctattccatcctctggaacagccaccagattgtgttcttcgtcgaccaggtgccggtcagggtgttcaagaacaacggcgaggcgaacaacttcttccccaacgagaagcccatgtacctcttctcgagcatctggaacgccgacgactgggccacgaggggcggccttgagaagaccgactggaccaaggcgccgttcgtgtccacctac

SEQ ID NO: 768 - DNA, 371 bp, Eucalyptus grandis
gttcggcctgatcgaagtcaatctcaccgtgaccgcttactacttgtcttcgcaagggccaactcacgatgagattgacttcgagttcctggggaacctgagcggcgacccttacatcctccacaccaacgtcttcactcaagggaagggcaacagggagcagcagttctacctgtggtttgaccccaccagaaatttccacacatactccgtcatctggaagccccagcacatcatcttcttggtaacaacatcacccatctctctctctctctcccccactctctctcaagccaaaatataagccaaagtataagccaaagtatagagcaatcatggcccatgaaggtggaggtcctagtgcttcctcc

SEQ ID NO: 769 - DNA, 368 bp, Eucalyptus grandis
gttcggccggatcgaagtcaatctcaccgtgaccgcttactacttgtcttcgcaagggccaactcacgatgagattgacttcgagttcctggggaacctgagcggcgacccttacatcctccacaccaacgtcttcactcaagggaagggcaacagggagcagcagttctacctgtggtttgaccccaccagaaatttccacacatactccgtcatctggaagccccagcacatcatcttcttggtagacaacatcacccatctctctctctctctcccccactctctctcaagccaaaatataagccaaagtataagccaaagtatagagcaatcatggcccatgaaggtggaggtcctagtgcttc

SEQ ID NO: 770 - DNA, 342 bp, Eucalyptus grandis
ccagtccaagaacgagtacctgtttggcaagattgacatgcaactcaagctcgttcccggcaactccgcaggcaccgtcaccgcttactatttatcttcaaacgggtcgacgtgggacgagatagacttcgagttcttggggaacttgagcggcgatccatacattctccacaccaacgtcttcagccaaggcaagggtaaccgagagcagcaattctatctctggttcgacccaactgctgatttccacacctactccatcctctggaatccacaacgcatcatattctcatggacgggactcccatcagagagttcaagaacgcagagtccatcggcgtt

SEQ ID NO: 771 - DNA, 580 bp, Eucalyptus grandis
ctcctcttcagtcctcactctcatatcatctcattgagatttgcttctcttcagcaactacagcagcagcagcagcagacagaacacgcccaatatggcctccctttctacttcttcgcttcgcatcgccactctgcttctcgtggtcgtttcttgggggacgtttgcttccgcccgcaacttctatcaagacttcgacataacctggggtgatggccgagctcagatcctcaacaacggcgacctcctcactctctccctcgacaaggcctccggctccggcttccagtccaagaacgagtacttgttcggcaagattgacatgcagctcaagctagttcccggcaactccgctggcaccgtcaccgcatactatttatcttcaaacgggtcggcgtgggatgagatagacttcgagttcttggggaacttgagcggcgatccatacattctccacaccaacgtcttcagccaaggcaagggtaaccgagagcagcaattctatctctggttcgacccaactgctgatttccacacctactccatcctctggaatccacaacgcatcatattctcagtg

SEQ ID NO: 772 - DNA, 407 bp, Pinus radiata
agtagtgtgcccttcacaacaattatgtcgccagctggggctcagatcacatcaaacattccatggcggtcgaaagatgagctgctcctcaacaaacagtatggtgcggggtttgagtcgaaggggacatatttatttgggcatttcagtatgcagataaagctggttgccggtgattccgctggcactgtcaccgccttttatctttcttctcagactgcagagcacgatgagatagactttgaattcttggggaacaagtcgggggaaccctacattcttcagaccaatgtatttacgggcgggaagggtgagagagagcaccgaatatacctctggttcgaccccaccaaggattaccattcctatgcggtgctctggaacatgtcccaaattgcatttttggt

SEQ ID NO: 773 - DNA, 403 bp, Pinus radiata
  misc_feature (1)...(403): n = A,T,C or G
tgacaatggacaagagttgcagcttactcttgaccgctcttcaggttgtggtattcaatccaagcaagagtatctatttgccaagattgatatccaaatcaagttggtacctggcaactctgcaggcacagtcactaccttttatctatcatctcaaggtcccaaacacgacgaaatagacttcgaatttctgggcaacctgtccggagatccttatattttgcacactaatgtctttgctcaaggccttggtgggcgtnagcagcaattttacttgtggttcgacccaaccctggatttccacacttactccgtgctctggacatcaaaccaaattatattttctgtagacgggagtctattcgagtgtttaagaacagggagacagagtngggtaaagtgg

SEQ ID NO: 774 - DNA, 400 bp, Pinus radiata
tgacaatggacaagagttgcagcttactcttgaccgctcttcaggttgtggtattcaatccaagcaagagtatctatttgccaagattgatatccaaatcaagttggtacctggcaactctgcaggcacagtcactaccttttatctatcatctcaaggtcccaaacacgacgaaatagacttcgaatttctgggcaacctgtccggagatccttatattttgcacactaatgtctttgctcaaggccttggtgggcgtgagcagcaattttacttgtggttcgacccaaccctggatttccacacttactccgtgctctggacatcaaaccaaattatatttctgtagacgggagtctattcgagtgtttaagaacagggagacagagttgggtaaagt

SEQ ID NO: 775 - DNA, 384 bp, Pinus radiata
gataactgttgttgataataatggcttgtttaagaatgcagagttgctgcttcttcattctggttttttgcttctgggtatctaattgtgcagagttcaatgatatcttcgagcccagctgggcgattgatcatgttatgaacgagggagagctgttgaagctgaagctcgacaacttttctggcgctggcttttcttccaaggcaacatacttgtttggaaaagtaggggcgcagattaaactcgttcccggcgactctgcgggcacgtgactgcattttatatgtcttctgaggggacattgcatgacgaattcgatttcgaattcttgggaaatgcttcgggtgagccttacattgtgcagactaatatctactcaatggg

SEQ ID NO: 776 - DNA, 345 bp, Pinus radiata
tgagaaacagcccatgagggggtcctcttcaatctggatgcagataactgggctactcaaggtgggcggctgaagataaactggggccattctccttttatctccacttacaaaggcttcaacattggtgcaaacaaatacggattaaatggagaaccaagaggggttattaaaaatggaagtaagtggtgggacaggccctctcattcttcccttactccattacaaaggcgaatgctccgatgggtacatcggaactatatcatctatgattactgcaaggattcgaccaggttttccacttcgccacctgagtgtgcaggcctccgcttctagttctttata

SEQ ID NO: 777 - DNA, 449 bp, Pinus radiata
gttgggtagcaacgtatgcagataagctgttgttaaaatggcttctttgagtatgcagagctgcttcttaattctggctctttgcttctgggcatcccattgtgcacagtttaatgatatcttcgagcccagctgggcgacagatcatgttatgtatgagggagagctgttgaagcttaagctggacaatatttccggggctggctttgcttccaagacaacatatttgtttggaaaagcaggggcacagattaagctcgttccaggtgactctgcaggcacagttactgctttttatatgtcttctgaggggactctgcacgacgaattcgatttcgaattcttgggaaatgcttcgggtgagccttacattgtgcagacgaatatctactccaacggcactggcaaaagggaacaacgtattacctctggttcgaccccacggcaga

SEQ ID NO: 778 - DNA, 354 bp, Pinus radiata
tattaatccataattatggacatgggcatgcccctcctctttcttttcttattaataacctcgtcgagtcttcttgtaactgtttctgcaaatttctacaacgatgtagatatcacatggggcaatggtcgtggtaaaatccttgacaatggccaacaattacagcttactctggatcgcacttcaggttgtgggtttcaatctaagaatgagtatctgtttgctaaaattgatatgcaaataaagttggtacctggcaactctgccggcacagttactgcctattatctgtcgtctcaaggttccgaacacgacgaaatagactatgaatttctaggcaacctgtctggagat

SEQ ID NO: 779 - DNA, 392 bp, Pinus radiata
ccggtctgttgttgtgggaaataggatggccgggaaaaggaattggttcaagagaatcgagtttattgttatattcgtggtttgcttaaactctgtttctgcacgcccggcatcatttgcagaggattttaaagtgacgtgggcagatgaccatgtcaaaacaaggtcagataacaactccatcgatctcatcctggatcagaattcaggggcaggatttgcctccaagaatcagtacatgtttggacttgtaagcatgaacatcaaacttgtggcgggtgattctgcagggacagtcactgctttttatatgagctcggacaaggaggaagtgcgagatgaattggatttcgagtttctggggacagatcaggacagccttatacagtcca

SEQ ID NO: 780 - DNA, 293 bp, Pinus radiata
cgtttattcaaaaggggttggcaacagagaacagcgctttttcttatggttcgacccaactgcagactttcattcctattcctttctgtggaatcgccaccaagttgttttctttgtggatgatgtgcccgtacggatattttccaacaatgagaaaagaggagtcccatatcctcaaactcaacccatgggcgtatactcgtcaatatggaacgcagacgattgggctactcaagggggcctcgtcaagaccgattggagccacgcacctttcatttccacatacaagaatt

SEQ ID NO: 781 - DNA, 451 bp, Pinus radiata
ctccaatggcactggcaacagggaacaacgcatttacctctggttcgaccccaccgcagatttccattcctattcttttctgtggaaccacaagcaagttgtattctttgtagacagtgttccgattagggtattccccaacaacgagaggctgggagtcccatatcctaagaaacagcccatgagggtatcctcttcaatctggaatgcagataactgggctactcaaggtgggcggctgaagataaactggagccattctccttttatctccacttacagaaggttcgacatcgatgcaaaccaatacggattaaatggagaatcaagagggtttattgagaatggaagtaagtggtgggacaggccctctcattcttcccttactccattacaaaggcgaatgctcccgatgggtgcatcggaactatatcatctatgcctacctgaa

SEQ ID NO: 782 - DNA, 387 bp, Pinus radiata
cactggcttagatacacagtccagtcgaatcgggtcttgaggatggcattcgtaggttgtcaagaagggggtcgtgtcatgcactgcgctcttctttgtatctttgtaacgttgtgcaacctgctcgtgagctctcaatgtgcgtccttcgacgatttcttctaccccagttgggctgttgatcatgtcatgtcccaaggagagttgctccagctcaagcttgataacatttctggtgcaggatttgcttcgaagagcacatacatcttcggaaaagcaaatgtgcagattaagctcgttcccggggactctgctggcactgttactgcattctatatgtcttcccaaggcgatcagcatgacgaattcgactttgaatttttgggg

SEQ ID NO: 783 - DNA, 401 bp, Pinus radiata
cgtttattcaaaaggggttggcaacagagaacagcgctttttcttatggttcgacccaactgcagactttcattcctattcctttctgtggaatcgccaccaagttgttttctttgtggatgatgtgcccgtacggatattttccaacaatgagaaaagaggagtcccatatcctcaaactcaacccatgggcgtatactcgtcaatatggaacgcagacgattgggctactcaagggggcctcgtcaagaccgattggagccacgcacctttcatttccacatacaagaatttcagcattgatgcctgtcaatattcctcgaaaacgagctgcgcttcgtggtgggatgagcctgcttacgcttctcttgatggaaagcagaggctgaaactgaatgggt

SEQ ID NO: 784 - DNA, 370 bp, Pinus radiata
  misc_feature (1)...(370): n = A,T,C or G
cttcagaccaatgtatttacgggcgggaagggtgagagagagcaccgaatatacctctggttcgaccccaccaaggattaccattcctatgctgtgctctggaacatgtaccaaattgcatttttggtanatgaggtaccaatccgggtgttcaagaacagcaaggatctgggcgtgaggtacccatttaaccagccgatgaagatctattcgagcctgtggaatgctgatgactgggccacccgagggggtctggagaaaaccgactgggccaaggcgcccttcatcgcctcctacagggaattccacgtcgatgcctgtgaggcttctgctccgaaatcggtgtgcgcaacgaagggggcggcggtgg

SEQ ID NO: 785 - DNA, 241 bp, Pinus radiata
atctactccaacggcactggcaaaagggaacaacgtatttacctctggttcgaccccacggcagatttccattcctattcttttctatggaaccacaaccaagttgttttctttgtggatagtgttccgattcgggtattccccaacaacgagcggctgggagtcccatatccgaaaagccagccgctgagagtatcctcctcaatctggaatgcagccgactgggctacacaaggcgggc

SEQ ID NO: 786 - DNA, 180 bp, Pinus radiata
catctactccaacggcactggcaaaagggaacaacgtatttacctctggttcgaccccacggcagatttccattcctattcttttctatggaaccacaaccaagttgttttctttgtggatagtgttccgattcgggtattccccaacaacgagcggctgggagtcccatatcccgaaaa

SEQ ID NO: 787 - DNA, 264 bp, Pinus radiata
ctggactttgagtttctggggaacagaagtggagagccctatgctctgcagacgaacatctatgcaaagggtgtgggtggcagggaacagaggcacatcctctggttcgatccaacaacacagtttcacacttactccatcctctggaactctcatcagattgtgttcttcgtagaccaagttcctgtgagagtccacaggcacactgaggctacgagcgatgcgttccctaaagaacaggggatgtacatgttttccagcatt

SEQ ID NO: 788 - DNA, 298 bp, Pinus radiata
ttccattttccgcagaattcaaagcatggggcatcttctctactctctgggaaagccgattaactgggcgacgaggggcgggctggaaaagattgactggagcaaggcgccattcgttgcctcctacaggggatttgagatcgaatcctgccagtacccgggtaaagcgagctgcgtggttaacaccagcaattggtgggaagggttgagctacagcggcctcaaaccaaatcaagcgaggttatacaaatgggtgaggacgaattacatgatttatgattattgtaaggacacgccc

SEQ ID NO: 789 - DNA, 375 bp, Pinus radiata
tcgtaccaggagactctgcaggagttgtcactgcttattatatgtcttctgacacagacatgaatagggacgagctagattttgaatttctagggaacagaagtggacagccttatggtcttcagacgaacatctattcaaatggtgtgggtggaagggaacagaggcatatcctctggttcgatccaacgacagagtttcacacttactctatcctctggaacgctcatcagattgtgtttttcgtggaccaagttccattgagagtccacaggcacactaaggctacacgccatgtgttccctcgaaagcaggggatgtacatgttctccagcatttggaatggagacaactgggcaacgagaaggcggcctt

SEQ ID NO: 790 - DNA, 442 bp, Pinus radiata
  misc_feature (1)...(442): n = A,T,C or G
tcgtaccaggagactctgcaggagttgtcactgcttattatatgtcttctgacacagacatgaatagggacgagctagattttgaatttctagggaacagaagtggacagccttatggtcttcagacgaacatctattcaaatggtgtgggtggaagggaacagaggcatatcctctggttcgatccaacgacagagtttcacacttactctatcctctggaacgctcatcagattgtgtttttcgtggaccaagtnccattgagagtccacaggcacactaaggctacacgccatgtgttccctcgaaagcaggggatgtacatgtnctccagcatttggaatggagacaactgggcaacgagaggcggcnttgagaagacccaacctgggcggctgctccgttcgtatcttcgtacaagaaattccatgggctcggtgca

SEQ ID NO: 791 - DNA, 424 bp, Pinus radiata
cctattcgggtgttttccaacaatgagaaaagaggagtcccatttcctcaaacccgcccttatgggcgtatactcttcaatatggaacgcagatgactgggctactcaaggtggccgcgtaaagaccgattggagccacgctccttttatttccacatacacaagtttcaacatcgatgcttgcaaatatagccctggcagttcatgtacttcgtggtgggatcagccggcgtacgcctcacttaccgcaaagcagcgcatgcaactcaagtgggtacacgagaaatacatgatttacgattactgcaaagatccagttagatttggtacacctccagcagagtgtactgcatgatgtgggtctttaaacttgacttcctacccattccatgatcttaattcacaaatatttgtccacttgaat

SEQ ID NO: 792 - DNA, 219 bp, Pinus radiata
ggcacatgatgcatttatatgtcttctgaggggacttgcatgacgattcgatttcgaattcttgggaaatgcttcgggtgagccttacattgtgcagactaatatctactccaacggcactggcgacagggaacaacgcatttacctctggttcgaccccaccgcagatttccattcctattcttttctgtggaaccacaagcaagttgtattctttgt

SEQ ID NO: 793 - DNA, 405 bp, Pinus radiata
  misc_feature (1)...(405): n = A,T,C or G
attcggcagagctctggggtccncagcaccaaacaatctggaatgatcagtctggaataaccatttggctcgacaggaactcgggaagcggatttaaatcgctgagaccgtacaagtctggctacttcagtgcagccattaagttgcaggctgggtatactgcaggagtcaatactgccttttatttatcgaacaacgaggctcacccggactaccacgatgaaatagacattgaatttctgggaaatatcccgggaagaccttataccttacagaccaacatttatgtaagagctggaaatgcgggacgagggaggattattacaggaagggngcagcaaatccacctttggtttgatcccactaaggattttcaccgttacagcattctctggactccatttg

SEQ ID NO: 794 - DNA, 348 bp, Pinus radiata
ggaatggggagagctgggcaaccaacggaggaaagacaaagatcacctgggagccttacccatttgttgctcagttcagaaacttttacatcgatggctgtgagtggaatggaaaccctaggttctgcaagggaggcagcacacaaaattggtggaataagagaacatatgcttactttaacgctggggatagactcaaactccattgggtaaggaagcattatctcgtctatgactactgtaatgacaaggtcagattcaaagtagcccctgaggaatgcaggtaccacatttaatccatagcctgccgagcattttttagtatttggtaataagacagtctggtgg

SEQ ID NO: 795 - DNA, 377 bp, Pinus radiata
ctttctctgggaatcgccaccaatctgttttctttgtggacgatgtacctattcgggtgttttccaacaatgagaaaagaggagtcccatttcctcaaacccgccctatgggcgtatactcttcaatatggaacgcagatgactgggctactcaaggtggccgcgtaaagaccgattggagccacgctccttttatttccacatacacaagtttcaacatcgatgcttgcaaatacagccctggtagttcatgtacttcgtggtgggatcagccggcgtacgcctcacttaccgcaaagcagatcatgcaactcaagtgggtacacgagaaatacatgatttacgattactgcaaagattcagttagatttggtaca

SEQ ID NO: 796 - DNA, 379 bp, Pinus radiata
gacatggcttgtttaagattgcagagctgctgctttttcgttctggttttttgcttctgggtatctaattgtgcagagttcaatgatatcttcgagcccagctgggcgattgatcatgttatgaacgagggagagctgttgaagctgaagctcgacaatttttctggcgctggcttttcttccaaggccacatacttgtttggaaaagtaggggcgcagattaaactcgttcccggcgactctgcgggcacagtgactgcattttatatgtcttctgaggggacattgcatgacgaattcgatttcgaattcttgggaaatgcttcgggtgaagccttacattgtgcagactaatatctactccaaacgggaactggcg

SEQ ID NO: 797 - DNA, 315 bp, Pinus radiata
tagacattgaatttctgggaaatatcccgggaagaccttataccttacagaccaacatttatgtaagagctggaaatgcgggacgagggaggattattacaggaagggagcagcaaatccacctttggtttgatcccactaaggattttcaccgttacagcattctctggactccattgaagattatattttttgtggatgacatcccaataagaaagtatcgaaggacgaacccttacactttcccggcaaggcccatgtgggctgtacggatcgattctgggatgcatctccttgggctacagataacgggaa

SEQ ID NO: 798 - DNA, 412 bp, Pinus radiata
ggaaactttgatgatgatttttacattatgtggtcacctgatcatgtcaccaggctctacaatggacatggcgtgcagattagtatggacaggcagtcaggttcgggcttcgcaacgaagaaacaatatttgtttggcaagttcgaaatgcaaatcaagcttccaccaggaaattctgcgggcactgttgtggctgtttatttgtattccaatcagccaaacagagacgagatcgacattgaatttttgggcaatgttgatggcaaggacatcatcatgcagactaatgtttttgctaatggctacgatgatcgagagcagcggatcaaactctggttggatcccacagcagattttcacacatacacaatcttttggaaccgttaccacattgtatttctggtagatggct

SEQ ID NO: 799 - DNA, 303 bp, Pinus radiata
ggcagagctagattttgaatttctagggaacagaagtggacagccttatggtcttcagacgaacatctattcaaatggtgtgggtggaagggaacagaggcatatcctctggttcgatccaacgacagagtttcacacttactctatcctctggaacgctcatcagattgtgtttttcgtggaccaagttccattgagagtccacaggcacactaaggctacacgccatgtgttccctcgaaagcaggggatgtacatgttctccagcatttggaatggagacaactgggcaacgagaggcgg

SEQ ID NO: 800 - DNA, 298 bp, Pinus radiata
cgtggaccaagttccattgtgtgtccacaggcacactaaggctacacgccatgtgttccctcgaaagcaggggatgtacatgttctccagcatttggaatggagacaactgggcaacgagaggcggccttgagaagaccaactgggcggctgctccgttcgtatcttcgtacaagaaattccatggcctcggctgcaaatgggaggatcaaaacacgacccaatcgtcctgtgctcacagtaataatgcaagtgcaaggcactggtgggataagcccgaggcgcggactctgacgaag

SEQ ID NO: 801 - DNA, 268 bp, Pinus radiata
  misc_feature (1)...(268): n = A,T,C or G
tgaagctcaagcgcgtaccaggagactctgcaggagttgtcactgcttattatatgtcttctgacacagacatgaatagggacgagctagattttgaatttctagggaacagaagtggacagccttatggtcttcagacgaacatctattcaaatggtgtgggtggaagggaacagaggcatatcctctggttcgatccaacgacagagtttcacacttactctatcctctggaacgcncatcagattgtgtttttcgtggaccaagt

SEQ ID NO: 802 - DNA, 395 bp, Pinus radiata
cagagtttcacacttactctatcctctggaacgctcatcagattgtgtttttcgtggaccaagttccattgagagtccacaggcacactaaggctacacgccatgtgttccctcgaaagcaggggatgtacatgttctccagcatttggaatggagacaactgggcaacgagaggcggccttgagaagaccaactgggcggctgctccgttcgtatcttcgtacaagaaattccatggcctcggctgcaaatgggaggatcaaaacacgacccaatcgtcctgtgctcacagtaataatgcaagtgcaaggcactggtgggataagcccgaggcgcggactctgacgaagaaacagagggaatattacaggtgggtgaacagcaaatatttgact

SEQ ID NO: 803 - DNA, 429 bp, Pinus radiata
gttgggtagcagcgtagtgcagataagctgttgttaaaatggcttctttgagtatgcagaactgcttcttaattctggctctttgcttctgggcatcccattgtgcacagtttaatgatatcttcgagcccagctgggcgacagatcatgttatgtatgagggagagctgttgaagcttaagctggacaatatttccggggctggctttgcttacaagacaacatatttgtttggaaaagcaggggcacagattaagctcgttccaggtgactctgcaggcacagttactgctttttatatgtcttctgaggggactctgcacgacgaattcgatttcgaattcttggggaatgcttcgggtgagccttacattgtgcagaccgaatatctaactccaacggcactgggcaaaagggacaacgtattta

SEQ ID NO: 804 - DNA, 432 bp, Pinus radiata
gttgggtagcagcgttgtgcagataagctgttgttaaaatggcttctttgagtatgcagaactgcttcttaattctggctctttgcttctgggcatcccattgtgcacagtttaatgatatcttcgagcccagctgggcgacagatcatgttatgtatgagggagagctgttgaagcttaagctggacaatatttccggggctggctttgcttccaagacaacatatttgtttggaaaagcaggggcacagattaagctcgttccaggtgactctgcaggcacagttactgctttttatatgtcttctgaggggactctgcacgacgaattcgatttcgaattcttgggaaatgcttcgggtgagccttacattgtgcagacgaatatctactccaacggcactggcaaaaggggacaacgtatttacctct

SEQ ID NO: 805 - DNA, 438 bp, Pinus radiata
  misc_feature (1)...(438): n = A,T,C or G
cgggggtcctgttcgagtgtttnaagaacagggagacagagttgggtaaagtgganagcaattatcattatcccaaaacccaagcaatgagggtctactccagcctttggaatgcagatgattgggcaaccaggggtgggcttgtgaagaccgactggactaaagctccctttgttgcatccctccgcaatttcaatgctgccgctacttcttcttttgatgccgccgcagaggaggtggctttggaatcgaaccaagaacagaggcagaggctccagtgggtacgaaagaactacatgatctacgattattgtgcagacaccaagagattcccccagggaccgcctcccgaatgcaaataaaacctcaatcctttgaattcagagaatgaactctgaattctaccttccaaggaattctgattcatttctatttaca

SEQ ID NO: 806 - DNA, 393 bp, Pinus radiata
  misc_feature (1)...(393): n = A,T,C or G
accatattgtgttttctgtaagatgatatccccattagggtttacaagaacaacgaagcgagaggtgttccatttccgaagaatcaaagcatggggatcttcccaanncnctgggaagccgataactgggcgacgaggggcgggctggaaaagattgactggagcaaggcgccattcgttgcctcctacaggggatttgagatcgaatcctgccagtacccgggtaaagcgagctgcgtggttaacaccagcaattggtgggaagggttgagctacagcggcctcaaaccagatcaagcgaggttatacaaatgggtgaggacgaattacatgatttatgattattgtaaggacacgcccaggtatccagtgctgcccacttgagtgcaacgc

SEQ ID NO: 807 - DNA, 259 bp, Pinus radiata
cacagtttgaatggatatctttcgagcccagctgggcgacagatcatgttatgtatgagggagagctgttgaagcttaagctggacaatatttccggggctggctttgcttccaagacaacatatttgtttggaaaagcaggggcacagattaagctcgttccaggtgactctgcaggcacagttactgctttttatatgtcttctgaggggactctgcacgacgaattcgatttcgaattcttgggaaatgcttcggg

SEQ ID NO: 808 - DNA, 440 bp, Pinus radiata
gcagtttctttgtggatgatgtgcccgcacggatattttccaacaatgagaaaagaggagtcccatatcctgaaactcaacccatgggcgtatactcgtcaatatggaacgcagacgattgggctactcaagggggcctcgtcaagaccgattggagccacgcacctttcatttccacatacaagaatttcagcattgatgcctgtcaatattcctcgaaaacgagctgcgtttcgtggtgggatgagcctgcttacgcttctcttgatggaaagcagaggctgaaactgaaatgggtacacgagaaatacatgacttacgattactgcaaagattctgtcagatttcccacgcgtccagcagagtgtgaatgaaatgcccttcttaaacttgagctctcatcaagatcccccttcatttctttgtattgcatgcattcc

SEQ ID NO: 809 - DNA, 263 bp, Pinus radiata
  misc_feature (1)...(263): n = A,T,C or G
gaagccatgaagaggacacattttcttgttctgtttcncattctgttactccattctgctgccatggctaccactcccaggaagccagtgagtgtgccctttcacaacaattatgtcgccagctggggctcagatcacatcaaacaattccatggcggtcgaaagactgagctgctcctcaacaaacagtatggtgcggggtttgantcgaaggggacatatttatttgggcatttcagtatgcagataaagctggttgccgg

SEQ ID NO: 810 - DNA, 423 bp, Pinus radiata
aaatgacaaataaactgttgttaaaatggcttctttgagtatgcagagctgcttcttaattctggtctctttgcttctgggcatcccattgtgcacagtttaatgatatcttcgagcccagctgggcgacagatcatgttatgtatgagggagagctgttgaagcttaagctggacaatatttccggggctggctttgcttccaagacaacatatttgtttggaaaagcaggggcacagattaagctcgttccaggtgactctgcaggcacagttactgctttttatatgtcttctgaggggactctgcacgacgaattcgatttcgaattcttgggaaatgcttcgggtgagccttacattgtgcagacgaatatctactccaacggcactggcaaaagggacaacgtattaacctctgggt

SEQ ID NO: 811 - DNA, 483 bp, Pinus radiata
gtcaaaagcatttctcttttggatagctagcaggaggctggtgcttttctaggcaatgctgatcaatatggtgcccaatgtactgttatttctcttggtagcggcaatggctgctactgctaccccacctccgaagcctgtggatgtgccattccaaaaaaactatgtacccacctgggcttctgatcatatcaagtacattaatggggggaacgaagcgcactttctcttgacaaatggacaggtactggcttccaatccaagggtagctacttgtttggacatttcagtatgcagataaagatggttcctggtgactctgcaggcgttgtgactgccttttatttatcctctcagaactctgaacatgatgaaatagactttgagttcttgggcaataggtctggacaaccttacattctccaaactaatgttttcagtggaggaaggggggcaagagagcaacgcgaatatccctggttt

SEQ ID NO: 812 - DNA, 323 bp, Pinus radiata
tgacaatggacaagagttgcagcttactcttgaccgctcttcaggttgtggtattcaatccaagcaagagtatctatttgccaaagattgatatccaaatcaagttggtacctggcaactctgcaggcacagtcactaccttttatctatcatctcaaggtcccaaacacgacgaaatagacttcgaatttctgggcaacctgtccggagatccttatattttgcacactaatgtctttgctcaaggccttggtgggcgtgagcagcaattttacttgtggttcgacccaaccctggatttccacacttactccgtgctctgg

SEQ ID NO: 813 - DNA, 430 bp, Pinus radiata
tgacaatggacaagagttgcagcttactcttgaccgctcttcaggttgtggtattcaatccaagcaagagtatctatttgccaagattgatatccaaatcaagttggtacctggcaactctgcaggcacagtcactaccttttatctatcatctcaaggtcccaaacacgacgaaatagacttcgaatttctgggcaacctgtccggagatccttatattttgcacactaatgtctttgctcaaggccttggtgggcgtgagcagcaattttacttgtggttcgacccaaccctggatttccacacttactccgtgctctggacatcaaaccaaattatattttctgtagacgggagtcctattcgagtgttaagaacagggagacagagttgggaaagtggaaacaattatcattatcccaagagcaag

SEQ ID NO: 814 - DNA, 331 bp, Pinus radiata
gtttcgggcgccagtgaaggtcgttggaagccatgaagaggacacagtttcttgttctgtttctcattctgttactccattctgctgccatggctaccactcccaggaagccagtgagtgtgccctttcacaacaattatgtcgccagctggggctcagatcacatcaaacaattccatggcggtcgaaagactgagctgctcctcaacaaacagtatggtgcggggtttgagtcgaaggggacatatttatttgggcatttcagtatgcagataaagctggttgccggtgattccgctggcactgtcaccgccttttatctttcttctca

SEQ ID NO: 815 - DNA, 257 bp, Pinus radiata
  misc_feature (1)...(257): n = A,T,C or G
gcatttacctctggttcgaccccaccgtagatttccattcctattcttttctgtggaaccacaagcaagttgtattctttgtagacagtgttccgattagggtattccccaacaacgagaggctgggagtcccatatcctaagaaacagcccatganggnatcctcttcaatctggaatgcagataactgggctactcaaggtgggcggctnangataaactggagccattctcctttnatctccacttacaaaagg

SEQ ID NO: 816 - DNA, 216 bp, Pinus radiata
accccaccaaggattaccattcctatgctgtgctctggaacatgtaccaaattgcatttttggtagatgaggtaccaatccgggtgttcaagaacagcaaggatctgggcgtgaggtacccatttaaccagccgatgaagatctattcgagcctgtggaatgctgatgactgggccacccgagggggtctggagaaaaccgactgggccaaggcgc

SEQ ID NO: 817 - DNA, 393 bp, Pinus radiata
gccagctggggctcagatcacatcaaacaattccatggcggtcgaaagactgagctgctcctcaagaaacagtatggtgcggggtttgagtcgaaggggacatatttatttgggcatttcagtatgcagataaagctggttgccggtgattccgctggcactgtcaccgccttttatctttcttctcagactgcagagcacgatgagatagactttgaattcttggggaacaagtcgggggaaccctacattcttcagaccaatgtatttacgggcgggaagggtgagagagagcaccgaatatacctctggttcgaccccaccaaggattaccattcctatgctgtgctctggaacatgtaccaaattgcattttttggtagatgaggtacc

SEQ ID NO: 818 - DNA, 457 bp, Pinus radiata
gccagctggggctcagatcacatcaaacaattccatggcggtcgaaagactgagctgctcctcaacaaacagtatggtgcggggtttgagtcgaaggggacatatttatttgggcatttcagtatgcagataaagctggttgccggtgattccgctggcactgtcaccgccttttatctttcttctcagactgcagagcacgatgagatagactttgaattcttggggaacaagtcgggggaaccctacattcttcagaccaatgtatttacgggcgggaagggtgagagagagcaccgaatatacctctggttcgaccccaccaaggattaccattcctatgctgtgctctggaacatgtaccaaattgcatttttggtagatgaggtaccaatccgggtgttcaagaacagcaaggatctgggcgtgaggacccatttaaccagccgatgaagat

SEQ ID NO: 819 - DNA, 283 bp, Pinus radiata
  misc_feature (1)...(283): n = A,T,C or G
cgantatacctctggttcgaccccaccaaggattaccattcctatgctgtgctctggaacatgtaccaaattgcatttttggtagatgaggtaccaatccgggtgttcaagacacagcaaggatctgggcgtgaggtacccatttaaccagccgatgaagatctattcgagcctgtggaatgctgatgactgggccacccgagggggtctggagaaaaccgactgggccaaggcgcccttcatcgcctcctacagggaattccacgtcgatgcctgtgaggct

SEQ ID NO: 820 - DNA, 342 bp, Pinus radiata
cattcctattcttttttgtggaaccacaagcaagttgtattctttgtagacagtgttccgattagggtattccccaacaacgagaggctgggagtcccatatcctaagaaacagcccatgagggtatcctcttcaatctggaatgcagataactgggctactcaaggtgggcggctgaagataaactggagccattctccttttatctccacttacaaaaggttcgacatcgatgcaaaccaatacggattaaatggagaatcgagaggggttattgagaatggaagtaagtggtgggacaggccctctcattcttcccttactccattacaaaggcgatgc

SEQ ID NO: 821 - DNA, 316 bp, Pinus radiata
cgaatatacctctggttcgaccccaccaaggattaccattcctatgctgtgctctggaacatgtaccaaattgcatttttggtagatgaggtaccaatccgggtgttcaagaacagcaaggatctgggcgtgaggtacccatttaaccagccgatgaagatctattcgagcctgtggaatgctgatgactgggccacccgagggggtctggagaaaaccgactgggccaaggcgcccttcatcgcctcctacagggaattccacgtcgatgcctgtgaggcttctgctccggaatcggtgtgcgctacgcaggggg

SEQ ID NO: 822 - DNA, 460 bp, Pinus radiata
tgacaatggacaagagttgcagcttactcttgaccgctcttcaggttgtggtattcaatccaagcaagagtatctatttgccaagattgatatccaaatcaagttggtacctggcaactctgcaggcacagtcactaccttttatctatcatctcaaggtcccaaacacgacgaaatagacttcgaatttctgggcaacctgtccggagatccttatattttgcacactaatgtctttgctcaaggccttggtgggcgtgagcagcaattttacttgtggttcgacccaaccctggatttccacacttactccgtgctctggacatcaaaccaaattatattttctgtagacgggagtcctattcgagtgtttaagaacagggagacagagttgggtaaagtggataacaattatcattatcccaagagccaagcaatgagcgtctactccagcctttgg

SEQ ID NO: 823 - DNA, 329 bp, Pinus radiata
cgtctcaaggccccaaacatgacgaaatagactttgaatttcttggcaacctctctggggatccttatattatgcacactaatgtcttcgctcaaggccttggcaatcgtgagcaacaattttacttgtggttcgacccaaccttggatttccacacttactccgtgctctggacatcaaaccaaatcatattctctgtagacgagactcccgttcgagtgtttaagaacagggagacagagttgggtaaagtggatagcaattatcactatcctaagagccaagcaatgaaggtctattcaagcctctggaatgcagatgattgggcg

SEQ ID NO: 824 - DNA, 328 bp, Pinus radiata
ctttctctggaatcgccaccaatctgttttctttgtggacgatgtacctattcgggtgttttccaacaatgagaaaagaggagtcccatttcctcaaacccgccctatgggcgtatactcttcaatatggaacgcagatgactgggctactcaaggtggccgcgtaaagaccgattggagccacgctccttttatttccacatacacaagtttcaacatcgatgcttgcaaatacagccctggtagttcatgtacttcgtggtgggatcagccggcgtacgcctcacttaccgcaaagcagatcatgcaactcaagtgggtacacgag

SEQ ID NO: 825 - DNA, 352 bp, Pinus radiata
gcatttacctctggttcgaccccaccgcagatttccattcctattcttttctgtggaaccacaagcaagttgtattctttgtagacagtgttccgattagggtattccccaacaacgagaggctgggagtcccatatcctaagaaacagcccatgagggtatcctcttcaatctggaatgcagataactgggctactcaaggtgggcggctgaagataaactggagccattctccttttatctccacttacaaaaggttcgacatcgatgcaaaccaatacggattaaatggagaatcaagagggtttattgagaatggaagtaagtggtgggacaggccctctcattcttc

SEQ ID NO: 826 - DNA, 215 bp, Pinus radiata
  misc_feature (1)...(215): n = A,T,C or G
gccagctggggctcagatcacatcaaacaattccatggcggtcgaaagactgagctgctcctcaacaaacagtatggtgcggggtttgagtcgaaggggacatatttatttgggcatttcagtatgcagataaagctggttgccggtgattccgctggcactgtcaccgcctttnatctttcttctcagactgcagagcacgatgagatgacttt

SEQ ID NO: 827 - DNA, 463 bp, Pinus radiata
gttgacatggcttgtttaagattgcagagctgctgctttttcgttctggtttttttgcttctgggtatctaattgtgcagagttcaatgatatcttcgagcccagctgggcgattgatcatgttatgaacgagggagagctgttgaagctgaagcttggccattttttctggcgctggcttttcttccaaggccacatacttgtttggaaaagtaggggcgcagattaaactcgttcccggcgactctgcgggcacagtgactgcattttatatgtcttctgaggggacattgcatgacgaattcgatttcgaattcttgggaaatgcttcgggtgagccttacattgtgcagactaatatctactccaacggcactggcgacagggaacaacgcatttacctctggttcgaccccaccgcagatttccattcctattcttttctgtggaaccacaagcaagt

SEQ ID NO: 828 - DNA, 342 bp, Pinus radiata
caacttttctggcgctggcttttcttccaaggcaacatacttgtttggaaaagtaggggcgcagattaaactcgttcccggcgactctgcgggcacagtgactgcattttatatgtcttctgaggggacattgcatgacgaattcgatttcgaattcttgggaaatgcttcgggtgagccttacattgtgcagactaatatctactccaatggcactggcaacagggaacaacgcatttacctctggttcgaccccaccgcagatttccattcctattcttttctgtggaaccacaagcaagttgtattctttgtagacagtgttccgattagggtattccc

SEQ ID NO: 829 - DNA, 447 bp, Pinus radiata
ccggtctgttgttgtgggtaataggatggccgggcaaaggaattggttcaagagaatcgagtttattgttatattcgtggtttgcttaaactctgtttctgcacgcccggcatcatttgcagaggattttaaagtgacgtgggcagatgaccatgtcaaaacaaggtcagataacaactccatcgatctcatcctggatcagaattcaggggcaggatttgcctccaagaatcagtacatgtttggacttgtaagcatgaacatcaaacttgtggcgggtgattctgcagggacagtcactgctttttatatgagctcggacaaggaggaagtgcgagatgaattggatttcgagtttctggggaacagatcaggccagccttatacagtccaaacaaatgtgtttgctctcgggaagggtggccgcgagcagagagtgaatctctg

SEQ ID NO: 830 - DNA, 471 bp, Pinus radiata
tgtttaagaatgcagagttgctgcttcttcattctggttttttgcttctgggtatctaattgtgcagagttcaatgatatcttcgagcccagctgggcgattgatcatgttatgaacgagggagagctgttgaagctgaagctcgacaacttttctggcgctggcttttcttccaaggcaacatacttgtttggaaaagtaggggcgcagattaaactcgttcccggcgactctgcgggcacagtgactgcattttatatgtcttctgaggggacattgcatgacgaattcgatttcgaattcttgggaaatgcttcgggtgagccttacattgtgcagactaatatctactccaatggcactggcaacagggaacaacgcatttacctctggttcgaccccaccgcagatttccattcctattcttttctgtggaaccacaagcaagttgtattctttgtagacagtgtt

SEQ ID NO: 831 - DNA, 391 bp, Pinus radiata
taggatggccgggcaaaggaattggttcaagagaatcgagtttattgttatattcgtggtttgcttaaactctgtttctgcacgcccggcatcatttgcagaggattttaaagtgacgtgggcagatgaccatgtcaaaacaaggtcagataacaactccatcgatctcatcctggatcagaattcaggggcaggatttgcctccaagaatcagtacatgtttggacttgtaagcatgaacatcaaacttgtggcgggtgattctgcagggacagtcactgctttttatatgagctcggacaaggaggaagtgcgagatgaattggatttcgagtttctggggaacagatcaggccagccttatacagtccaaacaaatgtgtttgctctc

SEQ ID NO: 832 - DNA, 304 bp, Pinus radiata
catcccctgctttcgagggaacacatggcgtgtagccttagtgtgcctgtggactctcaatggaacttggtccacgaaaaacacaatctgatgagcgttccagaggatagagtaagtgtgaaactctgtcgttggatcgaaccagaggatatgcctctgttcccttccacccacaccatttgaatagatgttcgtctgaagaccataaggctgtccacttctgttccctagaaattcaaaatctagctcgtccctattcatgtctgtgtcagaagacatataataagcagtgacaactcctgca

SEQ ID NO: 833 - DNA, 234 bp, Pinus radiata
  misc_feature (1)...(234): n = A,T,C or G
acccatttaaccagccgatgaagatctattcgagcctgtggaatgctgatgactgggccacccgagggggtctggagaaaaccgactgggccaaggcgcccttcatcgcctcctacagggaattccacgtcgatgcctgtgaggcttctgctccgcaatcggtgtgcgctacgcaggggcggnggtggtgggatcaggaggagttcagagacctggatgggcggcaatggcggt

SEQ ID NO: 834 - DNA, 375 bp, Pinus radiata
ggagcattcgcctttgtaatggagtaagggaagaatgagagggcctgtcccaccacttacttccatttttaataacccctcttggttctccatttaatccgtatttgtttgcatcaatgttgaagcctttgtaagtggagataaaaggagaatggctccagtttatcttcagccgcccaccttgagtagcccagttatctgcattccagattgaagaggataccctcatgggctgtttcttaggatatgggactcccagcctctcgttgttggggaataccctaatcggaacactgtctacaaagaatacaacttgcttgtggttccacagaaaagaataggaatggaaatctgcggtggggtcgaaccagaggt

SEQ ID NO: 835 - DNA, 352 bp, Pinus radiata
gcagctttctcttgacaaatggacaggtactggcttccaatccaagggtagctacttgtttggacatttcagtatgcagataaagatggttcctggtgactctgcaggcgttgtgactgccttttatttatcctctcagaactctgaacatgatgaaatagactttgagttcttgggcaataggtctggacaaccttacattctccaaactaatgttttcagtggaggaaagggggacagagagcaacgcgtatatctctggtttgaccccacaaaagactatcattcctacactgtcctttggaatatgcatcagattgtattctttgtggatgatgtccccatcagagtt

SEQ ID NO: 836 - DNA, 368 bp, Pinus radiata
ctataagtccggattcttcagtgctgctattaagctacaggcaggttatacagctggagtcattgcagcactctatctctccaataaccaggagtacccaggtcaccatgacgaaatagacattgagttcctggggacaacaccaggaaaaccctacaccttacagaccaatgtttacataaatggaacaggggatgggcaggttctcacaggcagggagttgaagtttcatctctggtttgacccaactgaagacttccataactacagccttctctggactccaagttatatcatcttctatgtagatgatattgctatccgaaagtacccaagaagaatttcatctacttatccattgaggccac

SEQ ID NO: 837 - DNA, 402 bp, Pinus radiata
ggagcattcgcctttgtaatggagtaagggaagaatgagagggcctgtcccaccacttacttccatttttaataacccctcttggttctccatttaatccgtatttgtttgcatcaatgttgaagcctttgtaagtggagataaaaggagaatggctccagtttatcttcagccgcccaccttgagtagcccagttatctgcattccagattgaagaggataccctcatgggctgtttcttaggatatgggactcccagcctctcgttgttggggaataccctaatcggaacactgtctacaaagaatacaacttgcttgtggttccacagaaaagaataggaatggaaatctgcggtggggtcgaaccagaggtaaatgcgttgttccctgtcgccagtgc

SEQ ID NO: 838 - DNA, 389 bp, Pinus radiata
cacagactcgttgggtgcttactgaaagatagctagcaggaggctggtgcttttctagacaatgctgatcaatatggtgcccaatgtactgttatttctcttggtagcggcaatggctgctactgctacctcacctccgaagcctgtggatgtgccattccaaaaaaactatgtacccacctgggcttctgatcatatcaagtacattaatggggggaacgaagcgcagctttctcttgacaaatggacaggtactggcttccaatccaagggtagctacttgtttggacatttcagtatgcagataaagatggttcctggtgactctgcaggcgttgtgactgccttttatttatcctctcagaactctgaacatgatgaaatagact

SEQ ID NO: 839 - DNA, 451 bp, Pinus radiata
  misc_feature (1)...(451): n = A,T,C or G
ggatttaggagtgaggtatccattcaaccagcccatgaaaatctattcaagcttgtggaatgctgatgactgggctacaaggggtgggttggagaagacagactggagcaaggcaccctttgttgcatcatacaagggattccacgtggatgggtgtgaggcgtctatgcctcactctgcttgtccaactttaggccgtcgatggtgggatcagaaagccttcgatgaccttgatggacagcaatggaggaaactgaagtgggttcgtgataggtacaccatatacaactactgcactgacagagtgaggtatcctaaaatgtctccagagtgtaccanagaccgtgacatctaatagcacagcctccttgggatagatagctatatttttattctattcttcttcgacatatggctgttctaattatgttataactgccatttcgtagta

SEQ ID NO: 840 - DNA, 459 bp, Pinus radiata
gaataatttcaggtagtggattcaagtctttggaggcctataagtccggattcttcagtgctgctattaagctacaggcaggttatacagctggagtcattgcagcactctatctctccaataaccaggagtacccaggtcaccatgacgaaatagacattgagttcctggggacaacaccaggaaaaccctacaccttacagaccaatgtttacataaatggaacaggggatgggcaggttctcacaggcagggagttgaagtttcatctctggtttgacccaactgaagacttccataactacagccttctctggactccaagttatatcatcttctatgtagatgatattgctatccgaaagtacccaagaagaatttcatctacttatccattgaggccactttgggtatatggatcaatatgggatgcttcctcttgggctactgaaaatggca

SEQ ID NO: 841 - DNA, 476 bp, Pinus radiata
ttttttttttgaatcatcaaaagaatctcgcttttgtattaccagtaccctaaatgaattgattgataccctctaatattttacatgtgtgtctgagaaagaatgaaagaattaatgtaatagaaatgaatcagaatacttggaaggaaagaattcagagttcattctctgaattcaaaggattgaggttttatttgcattcgggaggcggtccctgggggaatctcttggtgtctgcacaataatcgtagatcatgtagttctttcgtacccactgtagcctctgcctctgttcttgcttcgattccaaagccacctcctctgcggcggcgtcaaaagaagaagtagcggcagcattgaaattgcggaaggatgcaacaaagggagctttagtccagtcggtcttcacaagcccacccctggttgcccaatcatctgcattccaaaggctggagtagaccctcattgctttgggt

SEQ ID NO: 842 - DNA, 293 bp, Pinus radiata
ggctgatcatggcagtaatcgtaagtcaaatatttgctgttcacccacctgtaatattccctctgtttcttcgtcagagtccgcgcctcgggcttatcccaccagtgccttgcacttgcattattactgtgagcacaggacgattgggtcgtgttttgatcctcccatttgcagccgaggccatggaatttcttgtacgaagatacgaacggagcagccgcccagttggtcttctcaaggccgcctctcgttgcccagttgtctccattccaaatgctggagaacatgtacat

SEQ ID NO: 843 - DNA, 460 bp, Pinus radiata
  misc_feature (1)...(460): n = A,T,C or G
gtgttgattggtctgattgcctgtgtttcttgccagtccgacggtgatgattcatctcccaaggtttttgatgataattttcagatattgtgggctcaggatcacttcaggacctctgaaaatggtcaagtatggcacctggttcttgaccagaactcaggttctgggttcaaatcgaagaacaagtatagattcggatggttcagcatgaagctcaagctcgtaccaggagactctgcaggagttgtcactgcttattatatgtcttctgacacagacatgaatagggacgagctagattttgaatttctagggaacagaagtggacagccttatggtcttcagacgaacatctattcaaatggtgtgggtggaagggaacagaggcatatcctctggttcgatccancgacagagttttacacttactctatcctctggaacgctcatcagattgtgt

SEQ ID NO: 844 - DNA, 491 bp, Pinus radiata
tggtgactctgcaggcgttgtgactgccttttatttatcctctcagaactctgaacatgatgaaatagactttgagttcttgggcaataggtctggacaaccttacattctccaaactaatgttttcagtggaggaaagggggacagagagcaacgcgtatatctctggtttgaccccacaaaagactatcattcctacactgtcctttggaatatgcatcagattgtattctttgtggatgatgtccccatcagagttttcaagaacagcaaggatttaggagtgaggtatccattcaaccagcccatgaaaatctattcaagcttgtggaatgctgatgactgggctacaaggggtgggttggagaagacagactggagcaaggcaccctttgttgcatcatacaagggattccacgtggatgggtgtgaggcgtctatgcctcactctgcttgtccaactttaggcccgtcgatggtgggatcaagaa

SEQ ID NO: 845 - DNA, 413 bp, Pinus radiata
gtttgcacagactcgttgggtgcttactgaaagatagctagcaggaggctggtgcttttctaggcaatgctgattaatatggtgcccaatgtactgttatttctcttggtagcggcaatggctgctactgctaccccacctccgaagcctgtggatgtgccattccaaaaaaactatgtacccacctgggcttctgatcatatcaagtacattaatggggggaacgaagcgcagctttctcttgacaaatggacaggtactggcttccaatccaagggtagctacttgtttggacatttcagtatgcagataaagatggttcctggtgactctgcaggcgttgtgactgccttttatttatcctctcagaactctgaacatgatgaaatagactttgagttcttgggcaatag

SEQ ID NO: 846 - DNA, 513 bp, Pinus radiata
gggagacagagttgggtaaagtggatagcaattatcattatcccaaaacccaagcaatgagggtctactccagcctttggaatgcagatgattgggcaaccaggggtgggcttgtgaagaccgactggactaaagctccctttgttgcatccctccgcaatttcaatgctgccgctacttcttcttttgatgccgtcgcagaggaggtggctttggaatcgaaccaagaacagaggcagaggctccagtgggtacgaaagaactacatgatctacgattattgtgcagacaccaagagattcccccagggaccgcctcccgattgcaaataaaacctcaatcctttgaattcagagaatgaactctgaattctaccttccaagtattctgattcatttctattacattaattctcattctttctcagacacacatgtaaaatattagagggtatcaatcatttcattttggtactgctatacaaaagcgagattcttttgatgaaaaaaaaaa

SEQ ID NO: 847 - DNA, 362 bp, Pinus radiata
ctacaccttacagaccaatgtttacataaatggaacaggggatgggcaggttctcacaggcagggagttgaagtttcatctctggtttgacccaactgaagacttccataactacagccttctctggactccaagttatatcatcttctatgtagatgatattgctatccgaaagtacccaagaagaatttcatctacttatccattgaggccactttgggtatatggatcaatatgggatgcttcctcttgggctactgaaaatggcaaatacagagcagattacagatatcagccatttgttgctaagttctctaagttcattctcagtggctgccctgtttcagactccacatgctcag

SEQ ID NO: 848 - DNA, 417 bp, Pinus radiata
ctcgtttctggaactgctgctctgcatcacaaactcttttcccaatccctaatcgacatcgacatcgacatcgacatcgacacacctcttcacctcctctttcttttattggcctcctcggcagctcttgcttctgcaaatttctacaatgatgtcgacattacatggggtaatgatcgtgctaaaatcattgacaatggacaagagttgcagcttactcttgaccgctcttcaggttgtggtattcaatccaagcaagagtatctatttgccaagattgatatccaaatcaagttggtacctggcaactctgcaggcacagtcactaccttttatctatcatctcaaggtcccaaacacgacgaaatagacttcgaatttctgggcaacctgtccggagatccttatattttgcac

SEQ ID NO: 849 - DNA, 291 bp, Pinus radiata
atattatgcacactaatgtcttcgctcaaggccttggtaatcgtgagcaacaattttacttgtggttcgacccaaccttggatttccacacttactccgtgctctggacatcaaaccaaatcatattctctgtagacgagactcccgttcgagtgtttaagaacagggagacagagttgggtaaagtggatagcaattatcactatcctaagagccaagcaatgaaggtctattcaagcctctggaatgcagatgattgggcgactagaggtggactcgtcaagacagact

SEQ ID NO: 850 - DNA, 299 bp, Pinus radiata
actgtcccaaggggagccgctccagctcaagctcgatcccgcttctggtgcagggtttgcttccaagcacacatacattttcggaaaagtgaatgggcaaattaaactcgttcctggagactctgctggcaccggtattgctttctatatgtcttcccaaggggacgaacacgatgaatttgactttgaatttttgggtaacatttctggacagccatacactgtgcagaccaatgtttattcaaaaggcagtggcaatagggagcaacgcatgttcttgtggtttgacccaactgtag

SEQ ID NO: 851 - DNA, 359 bp, Pinus radiata
gtgttcagtagtctgattgctagtgtttgttcccagtcccaaggggatgattcatctgctaaggtttttgatgataattttcagataatgtgggctgaggatcatttcaggacctctgaaaatggccaagtatggcacctggttcttgaccagaactcaggttctgggttcaagtccaagtataagtacagattcggatggtttagcatgaagctcaagctcgtaccgggagactctgcaggagttgtcactgcttattatatgtcttctaacaccgacatgaatagggacgagctggactttgagtttctggggaacagaagtggagagccatatgctctgcagacaaacatctatgc

SEQ ID NO: 852 - DNA, 347 bp, Pinus radiata
gtggaattgcttgtaggaggcggtgaagggcgccttgctccaatcggttttctccagaccccctcgggtggcccagttatccgcattccacaggctcgaatagatcttcattggttggttgaaagggaaccttatccccaggttcttgcagttcttgaacacgcggattggtaccgagtccacaaaaaaactgcacaaaaaacccatcacacacatcaatattcatgaacgttccagtgccaaattttgaaaagtttttttggttttttaggattttatttgtttagaattttggaaggattgtgaatttttcagaataaaaatatttaaaaaattttcaaatatct

SEQ ID NO: 853 - DNA, 434 bp, Pinus radiata
ggtgttcaagaacagcaaggatctgggcgtgaggtacccatttaaccagccgatgaagatctattcgagcctgtggaatgctgatgactgggccacccgagggggtctggagaaaaccgactgggccaaggcgcccttcatcgcctcctacagggaattccacgtcgatgcctgtgaggcttctgctccgcaatcggtgtgcgctacgcaggggcggcggtggtgggatcaggaggagttcagagacctggatgggcggcaatggcggtacttgaaatgggtgaggaagcactacaccatctacaattactgcactgacacgcccagaaacaagcaaatgcctccggaatgtgttcgcgatcgcgacaatatgtagtccagttatcctcatcatttgatgctacccatggctgaataatccgtggtcggataat

SEQ ID NO: 854 - DNA, 274 bp, Pinus radiata
attcaatccaagcaagagtatctatttgccaagattgatatccaaatgaagttggtacctggcaactctgcaggcacagtcactactttttatctatcatctcaaggtcccaaacacgacgaaatagactttgaatttctgggaaacctgtctggagatccttatattttgcacactaatgtctttgctcaaggccttggtggacgtgagcagcaattttacttgtggttcgacccaaccctggatttccacacttactccgtgctctggactt

SEQ ID NO: 855 - DNA, 366 bp, Pinus radiata
ataagctgttgttaaaatggcttctttgagtatgcagagctgcttcttaattctggctctttgcttctgggcatcccattgtgcacagtttaatgatatcttcgagcccagctgggcgacagatcatgttatgtatgagggagagctgttgaagcttaagctggacaatatttccggggctggctttgcttccaagacaacatatttgtttggaaaagcaggggcacagattaagctcgttccaggtgactctgcaggcacagttactgctttttatatgtcttctgaggggactctgcacgacgaattcgatttcgaattcttgggaaatgcttcgggtgagccttacattgggcagacgaatat

SEQ ID NO: 856 - DNA, 398 bp, Pinus radiata
  misc_feature (1)...(398): n = A,T,C or G
gtccagtcgaatcgggtctngaggatggcattcgtaggttgtcaagaagggggtcgtgacatgcactgngctcttctttgtatctttgtaacgttgtgcaacctgctcgtgagctctcaatgtgcgtncttngacgatttcttctaccccagttgggctgttgatcatgtcatgtcccaaggagagttgctccagctcaagcttgataacatttctggtgcaggatttgcttngaagagcacatacatcttcggaaaagcaaatgtgcagataaagctcgttcccggggactctgctggcactgttactgcattctatatgtcttcccaaggcgatcagcatgacgaattcgactttgaatttttggggaacacttttggggagccgtacgctgtgca

SEQ ID NO: 857 - DNA, 183 bp, Pinus radiata
cagtacatgtttggacttgtaagcatgaacatcaaacttgtggcgggtgattctgcagggacagtcactgctttttatatgagctcggacaaggaggaagtgcgagatgaattggatttcgagtttctggggaacagatcaggccagccttatacagtccaaacaaatgtgtttgctctcggg

SEQ ID NO: 858 - DNA, 464 bp, Pinus radiata
  misc_feature (1)...(464): n = A,T,C or G
cagactcgttgggtgcttactgaaagatagctagcaggaggctggtgcttttctaggcaatgctgatcaatatggtgcccaatgtactgttatttctcttggtagcggcaatggctgctactgctaccccacctccgaagcctgtggatgtgccattccaaaaaaactatgtacccacctgggcttctgatcatatcaagtacattaatggggggaacgaagcgcagctttctcttgacaaatggacaggtactggcttccaatccaagggtagctacttgtttggacatttcagtatgcagataaagatggntcctggtgactctgcaggcgttgtgactgccttttatttatcctctcagaactctgaacatgatgaaatagactttgagttcttgggcaataggtctggacaaccttacattctccaaactaatgttttcagtggaggaaagggggacaga

SEQ ID NO: 859 - DNA, 412 bp, Pinus radiata
tttacttgtggttcgacccaaccctggatttccacacttactccgtgctctggacttcaaaccaaattatattttctgtagacgggagtcctgttcgagtgtttaagaacagggagacagagttgggtaaagtggatagcaattatcattatcccaaaacccaagcaatgagggtctactccagcctttggaatgcagatgattgggcaaccaggggtgggcttgtgaagaccgactggactaaagctccctttgttgcatccctccgcaatttcaatgctgccgctacttcttcttttgatgccgccgcagaggaggtggctttggaatcgaaccaagaacagaggcagaggctccagtgggtacgaaagaactacatgatctacgattattgtgcagacaccaagagatt

SEQ ID NO: 860 - DNA, 376 bp, Pinus radiata
acgatgagatagactttgaattcttggggaacaagtcgggggaaccctacattcttcagaccaatgtatttacgggcgggaagggtgagagagagcaccgaatatacctctggttcgaccccaccaaggattaccattcctatgctgtgctctggaacatgtaccaaattgcatttttggtagatgaggtaccaatccgggtgttcaagaacagcaaggatctgggcgtgaggtacccatttaaccagccgatgaagatctattcgagcctgtggaatgctgatgactgggccacccgagggggtctggagaaaaccgactgggccaaggcgcccttcatcgcctcctacagggaattccacgtcgatgcctgtga

SEQ ID NO: 861 - DNA, 536 bp, Pinus radiata
gacatggcttgtttaagattgcagagctgctgctttttcgttctggttttttgcttctgggtatctaattgtgcagagttcaatgatatcttcgagcccagctgggcgattgatcatgttatgaacgagggagagctgttgaagctgaagctcgacaatttttctggcgctggcttttcttccaaggccacatacttgtttggaaaagtaggggcgcagattaaactcgttcccggcgactctgcgggcacagtgactgcattttatatgtcttctgaggggacattgcatgacgaattcgatttcgaattcttgggaaatgcttcgggtgagccttacattgtgcagactaatatctactccaacggcactggcgacagggaacaacgcatttacctctggttcgaccccaccgcagatttccattcctattcttttctgtggaaccacaagcaagttgtattctttgtagacagtgttccgattagggtattccccaacaacgagaggctgggagtcccatatcctaagaaaca

SEQ ID NO: 862 - DNA, 358 bp, Pinus radiata
gctatatctcccacagtttatgcagacgtctacagtgatattgatgtaacatggggcgaaaataacgcttgggtattgaacaatggccagggattgcagctttctcttaccaattattctggttcgggatttcaatcgtataaggagtttttgtttggaagcgttgatatctccatgaaactggtgcccggaaattccgccggtaccgttacgacatattatctatcttcaacaggtgaggggcacgacgaaattgatatggagttcctaggaaatgtttctggggagccctacattctgcatacaaacatttatgtcaatggttcagcccgataaagagcagcagttctatttatgg

SEQ ID NO: 863 - DNA, 322 bp, Pinus radiata
acgatgagatagactttgaattcttggggaacaagtcgggggaaccctacattcttcagaccaatgtatttacgggcgggaagggtgagagagagcaccgaatatacctctggttcgaccccaccaaggattaccattcctatgctgtgctctggaacatgtaccaaattgcatttttggtagatgaggtaccaatccgggtgttcaagaacagcaaggatctgggcgtgaggtacccatttaaccagccgatgaagatctattcgagcctgtggaatgctgatgactgggccacccgagggggtctggagaaaaccgactg

SEQ ID NO: 864 - DNA, 372 bp, Pinus radiata
tccatttccgcgtgcccggctgatcaggtcttcatttttctgcaaaataatttcattttgtgtaacatcgatgtgctcggaagcgatgaagactgcccaatttctgggtctgtttctcattctactactccattctgctgccatggctgccacgcccaagccagtgagtgtgcccttcggcaaaaattacggtgcaagctggggctcagaccacatcaaagaattccatggaggtcgaaaggtcgaacttcttctcaacaaacagtatggtgcggggttcgaatccaaggggacatatttgtttgggcatttcagcatgcagattaagttggttcctggtgactcggctggcactgtcacggccttctatct

SEQ ID NO: 865 - DNA, 519 bp, Pinus radiata
ataatggcttgtttaagaatgcagagttgctgcttcttcattctggttttttgcttctgggtatctaattgtgcagagttcaatgatatcttcgagcccagctgggcgattgatcatgttatgaacgagggagagctgttgaagctgaagctcgacaacttttctggcgctggcttttcttccaaggcaacatacttgtttggaaaagtaggggcgcagattaaactcgttcccggcgactctgcgggcacagtgactgcattttatatgtcttctgaggggacattgcatgacgaattcgatttcgaattcttgggaaatgcttcgggtgagccttacattgtgcagactaatatctactccaacggcactggcaacagggaacaacgcatttacctctggttcgaccccaccgcagatttccattcctattcttttctgtggaaccacaagcaagttgtattctttgtagacagtgttccgattagggtattccccaacaacgagaggctgggagtc

SEQ ID NO: 866 - DNA, 240 bp, Pinus radiata
ctctcatcacagggttcgaaccgcgacgagctggatttcgagtttctggggaataaatctggagatcctaccattcttcaaactaatgtatacgcaaatggaaaaggcgaccgcgagcagcgaatatacctctggtttgatccatccactgaattccacacctaccgtgttatctggaacgctgcgtatatcttatttatggtggatgaggtgcctgttagagtttttatgaacaacaac

SEQ ID NO: 867 - DNA, 392 bp, Pinus radiata
tgtttgcagagatttgttggggcaatgctgatcaagatggtccccaaactgttgctggtgctcttggtagctgcaatggctgctatggctgcctcacctcctaagcctgtggacgtaccattcccaaaaaattatgtacccacttgggctgctgatcatatcaagtacatcaatggtggaaatgaggttcagctttctctagacaaatggacaggtactggcttccaatccaagggtacctacttgtttggacactttagtatgcagataaagatggttcctggtgactctgcaggcactgtgactgccttttatctatcctcccagaatgccgagcacgatgaaatagattttgagttcctgggcaataggtctggacagccttacattct

SEQ ID NO: 868 - DNA, 605 bp, Pinus radiata
cgtgcccggctgatcaggtcttcatttttctgcaaaataatttcattttgtgtaacatcgatgtgctcggaagcgatgaagactgcccaatttctgggtctgtttctcattctactactccattctgctgccatggctgccacgcccaagccagtgagtgtgcccttcggcaaaaattacggtgcaagctggggctcagaccacatcaaagaattccatggaggtcgaaaggtcgaacttcttctcaacaaacagtatggtgcggggttcgaatccaaggggacatatttgtttgggcatttcagcatgcagattaagttggttcctggtgactcggctggcactgtcacggccttctatctttcttctcaaactgcagagcacgacgagatagatttcgaatttttgggcaacaggtctggacaaccttacattcttcagaccaatgtattcacaggaggcaagggtgagagagagcatcgcatatatctctggttcgatcccaccaaggattaccattcctatgcagtactctggaacatgtaccagatcgtgttttttgtggactcggtaccaatccgcgtgttcaagaactgcaaggacct

SEQ ID NO: 869 - DNA, 528 bp, Pinus radiata
atgaattcgatttcgaattcttgggaaatgcttcgggtgagccttacattgtgcagactaatatctactccaacggcactggcaacagggaacaacgcatttacctctggttcgaccccacggcagatttccattcctattcttttttgtggaaccacaagcaagttgtattctttgtagacagtgttccgattagggtattccccaacaacgagaggctgggagtcccatatcctaagaaacagcccatgagggtatcctcttcaatctggaatgcagataactgggctactcaaggtgggcggctgaagataaactggagccattctccttttatctccacttacaaaaggttcgacatcgatgcaaaccaatacggattaaatggagaatcgagaggggttattgagaatggaagtaagtggtgggacaggccctctcattcttcccttactccattacaaaggcgaatgctccgatgggtggatcggaactatatcatctatgactactgcaaggattcgacca

SEQ ID NO: 870 - DNA, 277 bp, Pinus radiata
ggaacatgtaccagatcgttttttttgtggactcggtaccaatccgcgtgttcaagaactgcaagaacctggggataaggttccctttcaaccaaccaatgaagatctattcgagcctgtggaatgcggataactgggccacccgagggggtctggagaaaaccgattggagcaaggcgcccttcaccgcctcctacaagcaattccacgtcgatgcctgcgaagcttctgtttcggagtcggtgtgcgctacgcaggggcggcggtggtgggatca

SEQ ID NO: 871 - DNA, 501 bp, Pinus radiata
caacaattatgtcgccagctggggctcagatcacatcaaacaattccatggcggtcgaaagactgagctgctcctcaacaaacagtatggtgcggggtttgagtcgaaggggacatatttatttgggcatttcagtatgcagataaagctggttgccggtgattccgctggcactgtcaccgccttttatctttcttctcagactgcagagcacgatgagatagactttgaattcttggggaacaagtcgggggaaccctacattcttcagaccaatgtatttacgggcgggaagggtgagagagagcaccgaatatacctctggttcgaccccaccaaggattaccattcctatgctgtgctctggaacatgtaccaaattgcatttttggtagatgaggtaccaatccgggtgttcaagaacagcaaggatctgggcgtgaggtacccatttaaccagccgatgaagatctattcgagcctgtggaatgctgatgactg

SEQ ID NO: 872 - DNA, 540 bp, Pinus radiata
gcgattctattctaagcagaccagggattcgattggagccttcagcattatctgctaaatttgatcgatatcgtttgcatctatggaggtttctagggctttaagttatgtccatttccttttgattgccattatctgcacagttatatctcccacagtttatgcagacgtctacagtgatattgatgtaacatggggcgaaaacaacgcttgggtattgaacaatggccagggattgcagctttctcttaccaattattctggttcgggatttcaatcgtataaggagtttttgtttggaagcgttgatatctccatgaaactggtgcccggaaattccgctggtaccgttacgacatactatttatcttctacaggtgaggggcacgacgaaattgatatggagtttttaggaaatgtttccgggcagccttacattctgcacacaaacatttatgtcaatggctcagccaataaagagcagcagttctatttatggttcgatccaacttcagatttccacaattactccattctctg

SEQ ID NO: 873 - DNA, 397 bp, Pinus radiata
gcccggctgatcaggtcttcatttttctgcaaaataatttcattttgtgtaacatcgatgtgctcggaagcgatgaagactgcccaatttctgggtctgtttctcattctactactccattctgctgccatggctgccacgcccaagccagtgagtgtgcccttcggcaaaaattacggtgcaagctggggctcagaccacatcaaagaattccatggaggtcgaaaggtcgaacttcttctcaacaaacagtatggtgcggggttcgaatccaaggggacatatttgtttgggcatttcagcatgcaaattaagttggttcctggtgactcggctggcactgtcacggccttctatctttcttctcaaactgcagagcacgacgagatagatttcg

SEQ ID NO: 874 - DNA, 371 bp, Pinus radiata
ataagctgttgttaaaatggcttctttgagtatgcagaactgcttcttaattctggctctttgcttctgggcatcccattgtgcacagtttaatgatatcttcgagcccagctgggcgacagatcatgttatgtatgagggagagctgttgaagcttaagctggacaatatttccggggctggctttgcttccaagacaacatatttgtttggaaaagcaggggcacagattaagctcgttccaggtgactctgcaggcacagttactgctttttatatgtcttctgaggggactctgcacgacgaattcgatttcgaattcttgggaaatgcttcgggtgagccttacattgtgcaaacgaatatctact

SEQ ID NO: 875 - DNA, 355 bp, Pinus radiata
ctttgtagacgatgtgcccgtacgggtatttgggaacaatgagaaagtgggagtcccgtatcctcaatctcaaccaatgggcgtatactcttcaatatggaacgcagacgactgggctactcaaggtggcctcgtcaagaccgattggagccacgcacctttcgtttccacatacacaaatttcagcatcgatgcctgtgattattccttgaaaacgacctgctcttcgtggtgggatgagcctgcttacgcttcgctcgatgcaaagcagaggctgaaactgaagtgggtgcaagagaaatacatgacttacgattactgcaaagatttagccaggtttcccacggctccgcca

SEQ ID NO: 876 - DNA, 337 bp, Pinus radiata
gcagagatttgttgggtaagggcaatgctgatcaagatggtccccaaactgttgctggtgctcttggtagctgcaatggctgctatggctgcctcacctcctaagcctgtggacgtaccattcccaaaaaattatgtacccacttgggctgctgatcatatcaagtacatcaatggtggaaatgaggttcagctttctctagacaaatggacaggtactggcttccaatccaagggtacctacttgtttggacactttagtatgcagataaagatggttcctggtgactctgcaggcactgtgactgccttttatctatcctcccagaatgccgagc

SEQ ID NO: 877 - DNA, 558 bp, Pinus radiata
gggtagcagcgtagtgcagataagctgttgttaaaatggcttctttgagtatgcagagctgcttcttaattctggctctttgcttctgggcatcccattgtgcacagtttaatgatatcttcgagcccagctgggcgacagatcatgttatgtatgagggagagctgttgaagcttaagctggacaatatttccggggctggctttgcttccaagacaacatatttgtttggaaaagcaggggcacagattaagctcgttccaggtgactctgcaggcacagttactgctttttatatgtcttctgagggaactctgcacgacgaattcgatttcgaattcttgggaaatgcttcgggtgagccttacattgttcagacgaatatctactccaacggcactggcaaaagggaacaacgtatttacctctggttcgaccccacggcagatttccattcctattcttttctatggaaccacaaccaagttgttttctttgtggatagtgttccgattcgggtattccccaacaacgagcggctgggagtcccatatccga

SEQ ID NO: 878 - DNA, 400 bp, Pinus radiata
tttttttttttttttttaggaaacaccttattcgttgctgattggctttattaatatttcaagcattacagagataagtcatcttgtgactgcaaaacagtaacgatgacataaataacaaagcatatctaagaagaatagattacagaagatatattaatatatctataaataagagcccctaagaggctgctattaaatgtcacggtctctggtacactctggaggcattgctggagacctcactttgtcagcgcagtagttatagatggtgtaactgttacgaacccccttcagttttctccattgcattccatcaaggtcatcgaaggccttttgatcccaccaccgacgaccctgagtagcacaagtcgactcagtacagaggcctcacacccat

SEQ ID NO: 879 - DNA, 500 bp, Pinus radiata
agatccctatattatgcacaccaatatcttcgctcaaggccttggcaatcgtgaacagcaattctacttgtggttcgacccaaccctggcttttcacacttactccgtgctctggacaccaaatcaaattacattgtccgtggacgggattcctgttcgtgtgtttaaaaacagggagacagaattggataaaacagatagcaattatcattatccgaagagccaagcaatgaggatgtactccagcctttggaatgcagatgattgggcaaccagaggtggcctcgtcaagacagactggactaaagccccctttgttgcatctttcagcaacttcagtgctgcgacttcttcttctaacttcgacggagaggatgttttggattcgaacgaagagcagaagcttcaatgggtgcgaaagaactatatgatctacgattactgtgcagacacaaaaaggttcccccaggggctacctgcagaatgcaaatgagcgctct

SEQ ID NO: 880 - DNA, 547 bp, Pinus radiata
atgctgtgcagcctggtagtgggctctcaatgtgcagccttcaacgatcttttctacgccagtgggctgctgaccatgttatgtcccagggcgatttgctccagctcaagctcgatcacacttctggtgcaggatttgcttcgaagagcacatacttgttcggaaaagtgaatgttcagatcaagctggttcctggcgactctgctggcaccgttactgctttctatatgtcttcccaaggtgatcaacatgacgaattcgactttgaattcttggggaacacttcaggagaaccgtacgttgtgcagacgaatgtttattcaaatggggttggcaacagagagcagcgtatttacctgtggttcgatccaactgcgaatttccattcctactcctttctctggaatcgccaccaatctgttttctttgtggacgatgtgcctattcgggtgttttccaacaatgagaaaagaggagtcccatttcctcaaacccgccctatgggcgtatactcttcaatatggaacgcagatgactgggctactca

SEQ ID NO: 881 - DNA, 197 bp, Pinus radiata
tctctagacaaatggacaggtactggcttccaatccaagggtacctacttgtttggacactttagtatgcagataaagatggttcctggtgactctgcaggcactgtgactgccttttatctatcctcccagaatgccgagcacgatgaaatagattttgagttcctgggcaataggtctggacagccttacattct

SEQ ID NO: 882 - DNA, 622 bp, Pinus radiata
catcctcctacatacattcgtttcactactctttctttgcacgcgtccatctcgagctattctattcctttcatcccttgcctacactaatctgcacttggatctcaaattcaagttcctctatttctattaacccataattatggacacaggaacgcccctcctctttcttttcttattaataacctcgtcgagtcttcttgtaattgtttctgcaaatttctacaacgatgtcgacatcacatggggcgatggtcgtggtaagatccttgacaatggccaacaattacagcttactctgaatcgcacttcaggttctgggtttcaatccaagaatgagtatctctttgctaaagttgatatgcaaatcaagttggtacctgggaactctgccggcacagttactgcttattatctgtcgtctcaaggtcccaagcacgacgaaatagactacgaatttctaggcaacctctctggagatccctatattatgcacaccaatatcttcgctcaaggccttggcaatcgtgaacagcaattctacttgtggttcgacccaaccctggcttttcacacttactccgtgctctggacaccaaatcaaattacattgtccgtggac

SEQ ID NO: 883 - DNA, 223 bp, Pinus radiata
gctggtgctcttggtagctgcaatggctgctatggctgcctcacctcctaagcctgtggacgtaccattcccaaaaaattatgtacccacttgggctgctgatcatatcaagtcatcaatggtggaaatgaggttcagctttctctagacaaatggacaggtactggcttccaatccaagggtacctacttgtttggacactttagtatgcagataaagatgg

SEQ ID NO: 884 - DNA, 304 bp, Pinus radiata
gagagcagaggatatacctctggtttgaccccacaaaagattaccatgcctactctgtgctctggaacatgcatcagatcgtattctttgtggacgatgtccccatcagagttttcaagaatagcagggacttatgagtgaggtacccatttaaccagcccatgaaaatatactcaagcctgtggaatgctgatgactgggccacaaggggtgggctggagaagacagattggagcaaagcaccatttgttgcatcatacaggggattccacgtggatgggtgtgaggcctctgtaactgagtc

SEQ ID NO: 885 - DNA, 367 bp, Pinus radiata
aaggggtgggctggagaagacagattggagcaaagcaccatttgttgcatcatacaggggattccacgtggatgggtgtgaggcctctgtaactgagtcgacttgtgctactcagggtcgtcggtggtgggatcaaaaggccttcgatgaccttgatggaatgcaatggagaaaactgaagggggttcgtaacagttacaccatctataactactgcgctgacaaagtgaggtctccagcaatgcctccagagtgtaccagagaccgtgacatttaatagcagcctcttaggggctcttatttatagatatattaatatatcttctgtaatctattcttcttagatatgctttgttatttatgtcat

SEQ ID NO: 886 - DNA, 358 bp, Pinus radiata
gggccacaaggggtgggctggagaagacagattggagcaaagcaccatttgttgcatcatacaggggattccacgtggatgggtgtgaggcctctgtaactgagtcgacttgtgctactcagggtcgtcggtggtgggatcaaaaggccttcgatgaccttgatggaatgcaatggagaaaactgaagggggttcgtaacagttacaccatctataactactgcgctgacaaagtgaggtctccagcaatgcctccagagtgtaccagagaccgtgacatttaatagcagcctcttaggggctcttatttatagatatattaatatatcttctgtaatctattcttcttagatatgct

SEQ ID NO: 887 - DNA, 343 bp, Pinus radiata
aaggggtgggctggagaagacagattggagcaaagcaccatttgttgcatcatacaggggattccacgtggatgggtgtgaggcctctgtaactgagtcgacttgtgctactcagggtcgtcggtggtgggatcaaaaggccttcgatgaccttgatggaatgcaatggagaaaactgaagggggttcgtaacagttacaccatctataactactgcgctgacaaagtgaggtctccagcaatgcctccagagtgtaccagagaccgtgacatttaatagcagcctcttaggggctcttatttatagatatattaatatatcttctgtaatctattcttctta

SEQ ID NO: 888 - DNA, 517 bp, Pinus radiata
ctcctacatgtttgagcgattttactcattcgtttcatactctttctttgcacgcgtccatctcgagctattctattcctctcatcccttgcctacactaatctgcacttggatctcaaattcaagttcctctatttctattaatccatgattatggacacaggaacgcccctcctctttcttttcttattaataacctcgtcgagtcttcttgtaattgtttctgcaaatttctacaacgatgtcgacatcacatggggcgatcgtcgtggtaaaatccttgacaatggccaacaattacagcttactctggatcgcacttcaggttctgggtttcaatccaagaatgagtatctctttgctaaagttgatatgcaaatcaagttggtacctgggaactctgccggcacagttactgcttattatctgtcgtctcaaggtcccaagcacgacgaaatagactacgaatttctaggcaacctctctggagatccctatattatgcacaccaatatct

SEQ ID NO: 889 - DNA, 543 bp, Pinus radiata
ctcgtgccgcttcagtttcgggcgccagtaaggtcgttggaagccatgaagaggacacagtttcttgttctgtttctcattctgttactccattctgctgccatggctaccactcccaggaagccagtgagtgtgccctttcacaacaattatgtcgccagctggggctcagatcacatcaaacaattccatggcggtcgaaagactgagctgctcctcaacaaacagtatggtgcggggtttgagtcgaaggggacatatttatttgggcatttcagtatgcagataaagctggttgccggtgattccgctggcactgtcaccgccttttatctttcttctcagactgcagagcacgatgagatagactttgaattcttggggaacaagtcgggggaaccctacattcttcagaccaatgtatttacgggcgggaagggtgagagagagcaccgaatatacctctggttcgaccccaccaaggattaccattcctatgctgtgctctggaacatgtaccaaattgcatttttggtagatgag

SEQ ID NO: 890 - DNA, 234 bp, Pinus radiata
tacatacagattcggatggtttagcatgaacctcacgctcgcaccgggacactctgcaagagtggacgatgcttattatatgtcttctaacaccaacatgaatagggacgagctggactttgagtttctggggaacagaagtggagagccatatgctctgcacacaaacatctatgcaaagggtgtgggtggtagggaacagaggcacattctctggttcgatccaacgacaca

SEQ ID NO: 891 - DNA, 311 bp, Pinus radiata
tgtttgcagagatttgttggggcaatgctgatcaagatggtccccaaactgttgctggtgctcttggtagctgcaatggctgctatggctgcctcacctcctaagcctgtggacgtaccattcccaaaaaattatgtacccacttgggctgctgatcatatcaagtacatcaatggtggaaatgaggttcagctttctctagacaaatggacaggtactggcttccaatccaagggtacctacttgtttggacactttagtatgcagataaagatggttcctggtgactctgcaggcactgggactgcctt

SEQ ID NO: 892 - DNA, 377 bp, Pinus radiata
caacgagaggctgggagtcccatatcctaagaaacagcccatgagggtatcctcttcaatctggaatgcagataactgggctactcaaggtgggcggctgaagataaactggagccattctccttttatctccacttacaaaaggttcgacatcgatgcaaaccaatacggattaaatggagaatcaagagggtttattgagaatggaagtaagtggtgggacaggccctctcattcttcccttactccattacaaaggcgaatgctccgatgggtgcatcggaactatatcatctatgactactgcaaggattcgaccaggttttccacttcgccacctgagtgtgcaggcctccgcttctagttggtctctatat

SEQ ID NO: 893 - DNA, 319 bp, Pinus radiata
  misc_feature (1)...(319): n = A,T,C or G
tgtttgcanagatttgttggggcaatgctgatcaagatggtccccaaactgttgctggtgctcttggtagctgcaatggctgctatggctgcctcacctcctaagcctgtggacgtaccattcccaaaaaattatgtacccacttgggctgctgatcatatcaagtacatcaatggtggaaatgaggttcagctttctctagacaaatggacaggtactggcttccaatccaagggtacctacttgtttggacactttagtatgcagataaagatggttcctggtgactctgcaggcactgtgactgccttttatctat

SEQ ID NO: 894 - DNA, 342 bp, Pinus radiata
gggtagcagcgtagtgcagataagctgttgttaaaatggcttctttgagtatgcagagctgcttcttaattctggctctttgcttctgggcatcccattgtgcacagtttaatgatatcttcgagcccagctgggcgacagatcatgttatgtatgagggagagctgttgaagcttaagctggacaatatttccggggctggctttgcttccaagacaacatatttgtttggaaaagcaggggcacagattaagctcgttccaggtgactctgcaggcacagttactgctttttatatgtcttctgagggaactctgcacgacgaattcgatttcgaattct

SEQ ID NO: 895 - DNA, 529 bp, Pinus radiata
ctggcttccaatccaagggtacctacttgtttggacactttagtatgcagataaagatggttcctggtgactctgcaggcactgtgactgccttttatctatcctcccagaatgccgagcacgatgaaatagattttgagttcctgggcaataggtctggacagccttacattctccaaactaatgttttcagtggaggaaaaggaaacagagagcagaggatatacctctggtttgaccccacaaaagattaccatgcctactctgtgctctggaacatgcatcagatcgtattctttgtggacgatgtccccatcagagttttcaagaatagcagggacttaggagtgaggtacccatttaaccagcccatgaaaatatactcaagcctgtggaatgctgatgactgggccacaaggggtgggctggagaagacagattggagcaaagcaccatttgttgcatcatacaggggattccacgtggatgggtgtgaggcctctgtaactgagtcgacttgtgctactca

SEQ ID NO: 896 - DNA, 501 bp, Pinus radiata
cgcagctttctcttgacaaatggacaggtactggcttccaatccaagggtagctacttgtttggacattcagtatgcagataaagatggttcctggtgactctgcaggcgttgtgactgccttttatttatcctctcagaactctgaacatgatgaaatagactttgagttcttgggcaataggtctggacaaccttacattctccaaactaatgttttcagtggaggaaagggggacagagagcaacgcgtatatctctggtttgaccccacaaaagactatcattcctacactgtcctttggaatatgcatcagattgtattctttgtggatgatgtccccatcagagttttcaagaacagcaaggatttaggagtgaggtatccattcaaccagcccatgaaaatctattcaagcttgtggaatgctgatgactgggctacaaggggtgggttggagaagacagactggagcaaggcaccctttgttgcatcatacaa

SEQ ID NO: 897 - DNA, 542 bp, Pinus radiata
  misc_feature (1)...(542): n = A,T,C or G
aattgtttctgcaaatttctacaacgacgtcnacgtcacatggggcaatggtcgcggtaaaatccttgaaatggccaacaattgcagcttactctggatcacacttcaggttctgggtttcaatccaagaaggagtatctgtttgctaaaattgatatgcaaatcaagttggtacctggcaattctgcaggcacagttactgcctattatctgtcgtctcaaggtcccaaacacgacgaaatagaccatgaatttctaggcaacctttccggagatccctatattatgcacactaatatcttcgctcaaggccttggcaatcgtgagcaacaattctacctgtggtttgacccaaccctggcttttcacacttactccgtgctctggacaccaaatcaaattacattgtctgtggacgggattcccgttcgtgtgtttaagaacagggagacagagttggctaaagtggatagcaattatcactgtcctaacagccaagcaatgagggtctattcaagcctctggaatgcagatgattgggc

SEQ ID NO: 898 - DNA, 350 bp, Pinus radiata
tggaaatgaggttcagctttctctagacaaatggacaggtactggcttccaatccaagggtacctacttgtttggacactttagtatgcagataaagatggttcctggtgactctgcaggcactgtgactgccttttatctatcctcccagaatgccgagcacgatgaaatagattttgagttcctgggcaataggtctggacagccttacattctccaaactaatgttttcagtggaggaaaaggaaacagagagcagaggatatacctctggtttgaccccacaaaagattaccatgcctactctgtgctctggaacatgcatcaaatcgtattctttgtggacgatg

SEQ ID NO: 899 - DNA, 356 bp, Pinus radiata
gtttgcacagactcgttgggtgcttactgaaagatagctagcaggaggctggtgcttttctaggcaatgctgattaatatggtgcccaatgtactgttatttctcttggtagcggcaatggctgctactgctaccccacctccgaagcctgtggatgtgccattccaaaaaaactatgtacccacctgggcttctgatcatatcaagtacattaatggggggaacgaagcgcactttctcttgacaaatggacaggtactggcttccaatccaagggtagctacttgtttggacatttcaatatgcagataaagatggttcctggtgactctgcaagcgttgtgactgccttttat

SEQ ID NO: 900 - DNA, 248 bp, Pinus radiata
gtgaatgtgcagattaagctcgttcctgacgactctgctggcaccgttactgctttctatatgtcttcccaaggcgatcagcatgacgaattcgactttgaatttttggggaatacttctggggagccgtacgctgtgcagaccaatgttttttctaagggggttggcaagcgtgagcagcggattttcttatggttcgacccaaccacggatttccattcctattcctttctctggaaaccgcagca

SEQ ID NO: 901 - DNA, 376 bp, Pinus radiata
caatggctgctactgctaccccacctccgaagcctgtggatgtgccattccaaaaaaactatgtacccacctgggcttctgatcatatcaagtacattaatggggggaacgaagcgcagctttctcttgacaaatggacaggtactggcttccaatccaagggtagctacttgtttggacatttcagtatgcagataaagatggttcctggtgactctgcaggcgttgtgactgccttttatttatcctctcagaactctgaacatgatgaaatagactttgagttcttgggcaataggtctggacaaccttacattctccaaactaatgttttcagtggaggaaagggggacagagagcaacgcgtatatctctg

SEQ ID NO: 902 - DNA, 416 bp, Pinus radiata
tttgtttgcacagactcgttgggtgcttactgaaagatagctagcaggaggctggtgcttttctaggcaatgctgatcaatatggtgcccaatgtactgttatttctcttggtagcggcaatggctgctactgctaccccacctccgaagcctgtggatgtgccattccaaaaaaactatgtacccacctgggcttctgatcatatcaagtacattaatggggggaacgaagcgcagctttctcttgacaaatggacaggtactggcttccaatccaagggtagctacttgtttggacatttcagtatgcagataaagatggttcctggtgactctgcaggcgttgtgactgccttttatttatcctctcagaactctgaacatgatgaaatagactttgagttcttgggcaatag

SEQ ID NO: 903 - DNA, 417 bp, Pinus radiata
tcgtgccgaattcggcagagctttgtcttctggggtggaagagaaggttaccaaactctcttgaatactgatctaaagaaggagcttgaccatatggccaaatttcttcaagcggccgtgaactggaagaaaaccattggcttcaatgggacccttctaattgagcctaagccacaagaacctacaaaacaccagtatgattgggatgctgcaacaactatgggcttcctacaaagatatgggcttggaggagaatttaaattaaatgttgagtgcaatcatgcaaccctctctgggcacagctgtcatcacgagctggaaatagcacagatttatgggatgcttggaaacattgatgcaaacactggagatgcccaaacaggctgggatactgatcaatttcttacggatattgga

SEQ ID NO: 904 - DNA, 314 bp, Pinus radiata
aaacactggagatgcccagacaggttgggatactgatcaatttctcacagatattagtgaagcaactttgatcatgttgactgttataaaaaatggagggcttgcacctggtggtttcaactttgatgcaaaactgaggagggaaagtgtagatgtagaagatctgttcattgctcatatatcagggatggacactttggcgcgaggattgagaaatgcagctcaactgctgcaggatggaacattaacagagcttgttcgaaagcgttatgaatcctttgattcaaaattgggagcttcaattgaggaaggca

SEQ ID NO: 905 - DNA, 323 bp, Pinus radiata
aaacactggagatgcccagacaggttgggatactgatcaatttctcacagatattagtgaagcaactttgatcatgttgactgtcataaaaaatggagggcttgcacctggtggtttcaactttgatgcaaaactgaggagggaaagtgtagatgtagaagatctgttcattgctcatatatcagggatggacactttggcgcgaggattgagaaatgcagctcaactgctgcaggatggaacattaacagagcttgttcgaaagcgttatgaatcctttgattcaaaattgggagcttcaattgaggaaggcagtctcagct

SEQ ID NO: 906 - DNA, 421 bp, Pinus radiata
aaagatatgggcttggaggagaatttaaattaaatgttgagtgcaatcatgcaaccctctctgggcacagctgtcatcacgagctggaaatagcacagatttatgggatgcttggaaacattgatgcaaacactggagatgcccaaacaggctgggatactgatcaatttcttacggatattggagaagcaactttaatcatgttgactgttataaagaatggtgggcttgcacctggtgggttcaactttgatgcaaaattgcggagagagagtgtagatgtggaagatctattcattgctcatatatcgggcatggacactcttgcacggggcttgagaaatgcggctaagctgttgcaggatggaagaatgccagagcttgttgcaaaacgttatgaaaccttcaattcagaactagg

SEQ ID NO: 907 - DNA, 530 bp, Pinus radiata
gagaggtggtgctttcatgaccgggatattgctcctgatggaagaacacttgcagaatcaaatgccaatctagatgctgttgttgctcttgccaaacagcttcaggaaggaactgaaattcgtcctctgtggggaactgcccagttgtttatgcatccccgctacatgcatggagctgctacaagtccagatatgcatgtctatgcatatgctgcagctcaagtcaagaaagctatggaggtgacaaatgaactagggggagagaattttgttttctggggtggaagagagggctatcaaactttgctgaatactgatctgaaaaaggaacttgaccatatggctaggtttctacaagcagcagtcaattggaagaagaatataggcttcaatggaactcttctaattgaacccaaaccacaagaacctacaaaacaccagtatgactgggatgctgcaacaacaatgggtttcctgcagagatatggccttgcagatgaatttaaattgaacattgagtgcaaccatgc

SEQ ID NO: 908 - DNA, 373 bp, Pinus radiata
caatgggacccttctaattgagcctaagccacaagaacctacaaaacaccagtatgattgggatgctgcaacaactatgggcttcctacaaagatatgggcttggaggagaatttaaattaaatgttgagtgcaatcatgcaaccctctctgggcacagctgtcatcacgagctggaaatagcacagatttatgggatgcttggaaacattgatgcaaacactggagatgcccaaacaggctgggatactgatcaatttcttacggatattggagaagcaactttaatcatgttgactgttataaagaatggtgggcttgcacctggtgggttcaactttgatgcaaaattgcggagagagagtgtagatgtg

SEQ ID NO: 909 - DNA, 959 bp, Pinus radiata
atggaattgatgtttttgatcccaagttcaacattgtttctcctggagcagacatgcagatttatttcccttatacagaaaagcagcatcgccttactactttacatggtacaattgaggaactcttgttcagtcccgaacagacagctgaacatatgtgtgctttgaatgaccgtaaaaagcccattatcttttctatggcaagactcgaccgggttaaaaatatgacaggattggtcgaatggtttgcaaagagcaaacgcttgagggagttggttaaccttgtcgtggttgctggtgatattgacccatcaaagtccaaagacagagaagaagtggccgaaattgaaaaaatgcatagactagttaaagagtataacctgaatgggcagttcagatggatatgtgcacaaaagaatagagtgcggaacggtgagctttaccgctacatctgtgacaccaggggtgcctttgtacagcctgcactttatgaagcttttgggcttactgttgttgaagcaatgacatgtggtcttcctacattcgcaacctgtaatgggggtcctgctgaaattattgtggatggggtgtccggatttcatattgatccctaccatggcgtttctgcaactgaacgcattgctgactttttcgagaagtgcaagacagatcccagtcattgggagaagatctctaatggtggtctacagcgtatctatgaaaagtatacatggcagatttatgccgacagattaatgacgctgtctggagtttatgggttttggaagtatgtatcaaaacttgaaaggcgagagacacgccgctatctggagatgttttacagcttaaagtacagaaatctggttaaaactgtgccattagctgttgaagaaagtgtcaatgggattgaagagaagagtacagaattccgttggttgcactcgtgccgctcgtgccga

SEQ ID NO: 910 - DNA, 304 bp, Pinus radiata
cgcaaaggcattctcagcatttgggaggaagcggatttgataaagataagtgatgaagaggtggcattcctgacgggaggagactctgataatgacgaagtggtgatgtcactctggcattccaaattaaaattacttctagtaactgatggacccaaaggctgccgatactatacaaagtcttttcgcggaaaggtagatacattatcagtgactgcaattgatacaacaggtgcaggagatgcatttgtgggaggtgttcatcctcaagaatagacatgtcacttgcaatctgagtcagaac

SEQ ID NO: 911 - DNA, 402 bp, Pinus radiata
cagagctttgtcttctggggtggaagagaaggttaccaaactctcttgaatactgatctaaagaaggagcttgaccatatggccaaatttcttcaagcggccgtgaactggaagaaaaccattggcttcaatgggacccttctaattgagcctaagccacaagaacctacaaaacaccagtatgattgggatgctgcaacaactatgggcttcctacaaagatatgggcttggaggagaatttaaattaaatgttgagtgcaatcatgcaaccctctctgggcacagctgtcatcacgagctggaaatagcacagatttatgggatgcttggaaacattgatgcaaacactggagatgcccaaacaggctgggatactgatcaatttcttacggatattgga

SEQ ID NO: 912 - DNA, 3348 bp, Eucalyptus grandis
gggcacgagctcttctcgtctcgctttctcatataaagaagtgaaagaatacgaggatactccacttgggtatcgccaagaactcattgggtcgcgagaagattggccaacatgatggaatccggggttcccctgtgcaacacttgcggagaggctgttggggttgatgagaaaggcgaggtcttcgtggcttgtcaagagtgcaacttcgccatttgcaaggcttgtgtcgaatatgagattaaggaaggaagaaaagcgtgcttgcgctgtggcactccatttgaagcgaactcgatggctgatgctgagagaaatgaattgggaagtcgatcgacaatggcagctcaactcaatgatcctcaggacacagggattcatgctagacacatcagcagtgtttctacgttggatagtgaatacaatgatgagactgggaaccctatctggaagaatagagtggagagctggaaggacaaaaagaataagaagaagaaggccccgacgaaggctgagaaagaggctcaagttccaccagagcagcagatggaagagaagcaaattgctgatgcttcagagccactctcgaccgttattcccattgccaaaagcaaactcgcaccataccgaaccgtaataataatgcgattgatcattttggcacttttcttccattaccgagtgacacatccagtcgacagcgcctatccattgtggcttacatccatcatatgtgagatttggttcgcatactcatgggtgttggatcagttcccgaagtggtctcccgtgaataggattactcatgttgacagactatctgcaaggtatgaaaaagaaggtgaaccttcagagcttgctgctgtcgacttcttcgtgagtacagtcgatccaatgaaagaaccacctttgatcactgccaatacagtgctttccatccttgctgtggactatcctgttgataaagtctcttgttatctttctgatgatggtgctgcgatgctctcattcgagtctcttgttgaaacggccgactttgcaagaaagtgggtacctttctgcaaaaagtattcgattgagccccgtgcgcctgagttctacttttctcagaagattgactacttgaaggataaaattcagccttcttttgtgaaggaacgaagagcaatgaaaagagactatgaggagttcaaagttcgagttaatgctttggtagcaaaagcgcagaaagcgccggaggaaggttggtctatgcaggatgggacaccttggcctggaaataactctcgtgaccaccctggaatgattcaggttttcctcggaagtagtggagcccacgacatcgagggaaatgaacttcctcggctggtgtatgtttccagagagaagagacccggtttccaacatcataaaaaggccggagcggaaaatgctctggtgagagtatctgcaattctgacaaatgctccgtacatcctcaaccttgactgcgatcattatgtcaactatagtaatgctgttcgtgaagcaatgtgcttcctgatggatcctcaagttggtagaaatttgtgctatgtgcagttccctcagagatttgatggtatcgatcgcagtgatcgatatgccaaccgaaataccgttttctttgatgttaacatgaaagggctggatggaatccaaggaccagtttatgtcgggacaggatgtgttttcaataggcaagcactttacggatacggacccccttctatgccgaatttaccaaagccctcctcatcatgctcctggtgtggctgctgctcttgttgctgcccttcaaagaagcccactaaagatctctcagaagtttaccgagactcaaaaagggaagacctaaatgccgccatcttcaaccttggagagattgacaattatgatgagcatgagagatcaatgctgatctctcagatgagctttgagaaaacttttggcttgtccactgtgtttattgagtcgacgctgttggcaaatggaggagttcctgaatctgcccatccgtctatgctgatcaaagaagccattcatgtcattagctgtggctatgaagagaagaccgcatggggcaaagagatcggttggatatatggctcggttactgaggatatcttaacagggttcaagatgcactgcagaggatggaggtcggtctattgcatgcccttaaggcctgcattcaagggatcagcgcccattaatttgtcagacagactgcaccaagttctccgatgggctctgggttccgtggaaatattcttgagtagacattgtccactttggtatggatttggcggaggccgcctcaagtggcttcaaagattggcgtacataaacaccatcgtttatccattcacatccctccctcttgtcgcttattgcacaattcctgcgatctgcctccttactggaaagttcatcattccaacgctttccaacttggcaagcgtgctatttcttggtcttttcctctccatcatcgtcacaagtgtgctcgagctgcgatggagtggcgtgagcattgaggactggtggcgtaacgagcagttctgggtgattggaggtgtctcagcccatctctttgccgtcttccaaggattcctgaagatgttagctggcctagacaccaacttcaccgtcactaccaaagcagccgacgacgcggagtttggtgagctctacatgatcaagtggacgacgctgctgatacccccgaccactcttctcatcgtgaacatggtgggtgtcgttgccgggttctccgatgcgctgaacaaaggttatgaggcgtggggacccctctttggcaaggtcttctttgcattctgggtgattcttcatctctatccattcctgaaaggtctcatgggtaggcagaacaggactccgaccattgtggttctctggtcggtgttctggcttctgtcttctctctcgtctgggtgaagatcgatccattcgtgagcaaatccgatgctgacctctcccagagctgcagttctatagattgttgaattgcgcgagtgttggcttgtgtttatcaaggatctcaagctgtttttgcagttttgcgcctcttgaagattggggaaataccgagtttatgatgttggaaatttgctaaagaaagggtgattattgtattcatgaattgatatgtagaggcgagacatttttcctcactatcccaaaaattcctggctttgtgtacttgtaaaatggtacgagaaagaaagagtattccctgtatttcttgaacaatttaacattagaatgtgcgatgcatggtgatcaaaatctaaaaaaaaaaaaaaa

SEQ ID NO: 913 - DNA, 530 bp, Eucalyptus grandis
acttggagaagaggcgctcgagctccgattggcgcgttatttgaagtaaccaagaaagaccaatctacatctagtgatagcaccaacgccgaacttgggaggttcacctttgatgagtccccaatttttgtaccaggcactgctcttctactggtgcacctgatagcaacatttacaatgttgttagggttgcgcccccaagcatccagaagtagcggctctggcatgggagaggtgatctgtactatgtgggtggttctgtgtttctggccattttttaggggtttgtttgggaaaggaaaatatgggattccctcgactacgataatgaagggagctatcgtagcaaccattattgcttacttatttagattcacacccacaggttggtaagggctgcagattgttgatgtttgaacatgcaaattcaaaagcatggtagtacaattagtcatgccttttctttctgaattctcgttgtgtttagtgaaactctcatgaagcaacaaatttccaaaaaaaaaaaaaaa

SEQ ID NO: 914 - DNA, 516 bp, Eucalyptus grandis
gagaaatctttattgatgtcccaaatgagccttgagaaaaggttcggtcagtctgctgtttttgtagcctcgactctcatggaaaatggcggtgttcctcaatctgcaacaccagaaacccttcttaaagaggctattcatgttatcagctgtgggtatgaggataaatcagaatggggcagtgagattggatggatttatggttctgttacagaagatattctcacaggattcaaaatgcatgcccgtggttggcggtcaatctattgcatgccaaaactccctgcctttaaaggttctgcccctatcaatctttcagatcgactgaatcaagtgcttcgatgggccctaggttcagtggaaattctttttagtcggcactgccccatatggtatggctatggtggtagactgaagtggcttgagagatttgcatatgttaacacaacaatttatccagtcactgccatccctctcttgatgtactgtaccttgccagctgtctgtctacttaca

SEQ ID NO: 915 - DNA, 501 bp, Eucalyptus grandis
cactgcttggcactgctgatgatgctaagataataaaccttactgatgttgatatccgccttcccttgcttgtttacgtatcccgtgaaaagcgtcctggctatgatcacaacaaaaaggcaggggctatgaatgcgctagtccgtgcctcagccattatgtctaatggccccttcatgctcaaccttgattgtgaccactacatctacaactcacaggcattgagggaagggatgtgcttcatgatggacagaggcggggaccgcatttgctatgtccaatttccccagagatttgagggtattgatccatccgatcgttatgccaatcacaacactgtcttctttgacgtgaatatgcgagcccttgacgggctccaaggccctgtctatgtgggaacaggatgcctcttccggagggttgctctgtatgggtttgaccccccacgtgcaaaagagcatcaacctggttgctgtaactgctgctttgatcgtcgcaaaa

SEQ ID NO: 916 - DNA, 920 bp, Eucalyptus grandis
aatggacgactggaagctgcagcagggcaacctcggccctgaacctgatgacatcaatgacccggacatggcaatgatagatgaggcaaggcagccactctccaggaaagtaccaattgcatcgagcaagatcaacccataccggatggtgatagttgctcggcttgccatattggctttcttccttcgatacaggatattgaacccagtacatgatgcatttggtctttggttaacatccatcatctgtgagatatggttcgctttctcctggatcctggatcagtttcccaaatggttccctattgatcgtgagacctatcttgatcgcctctctctcagatatgaaagggaaggtgaacctaatatgctttctccagtagatgtctttgtcagtacagtggatcctatgaaagagcccccacttgtgacaggaaacacagttctgtcaatattggctatggactatccagtcgataagatttcctgctacgtttctgatgatggagcttcaatgctcacctttgaatctttgtctgaaaccgccgaatttgctcgaaaatgggtacccttctgcaaaaagttctctatagagccccgagcccctgaaatgtacttcactttgaagattgattatctcaaagacaaagtccagccaaccttcgtcaaagagcggcgagcaatgaagagagaatatgaagaattcaaagtgcggatcaatgcgttggttgctaaagctgcgaaggtacctccagagggatggatcatgcaagacggtacaccatggccaggaaacaacacaaaggatcatccaggcatgattcaagtctttcttggacacagcggaggtcttgatgcagacggaaatgagctccctcgccttgtttatgtatctcgtgagaagaggagtcgacgcggcc

SEQ ID NO: 917 - DNA, 478 bp, Eucalyptus grandis
ctgatttatggctcactgaggatgccaattttgcaaagcatgtgctatgctgaacttgcatttttcccactcttttgcttgcccatttgcatctttgccactattcctcagatctgtctattgaatggcatcgccatatatccaaaggtttcaagtacatattccatggtattttccctggtgtttgtttcatcactctgcaagcacctgtacgaagtcgttgccagcggtcactcggttcgagcgttcataaacgagcaacggatgtggatgatcaggtcggtgactagtcacgtgtatggaacaatggacgcaaccctgaagcaacttggcatgagaaaagctagcttctcgccgacgaataaggctgccgatgaccagcaatcgaagagatacgagatgggcgtatttgatttccagacatccacgatgtttttggctccgatggtgaccgcagtgatattgaacgtggcttgct

SEQ ID NO: 918 - DNA, 589 bp, Eucalyptus grandis
gtttaaggttcgtataaatgctttggtggccaaagcccagaaggttcctgaagaagggtggacgatgcaggacggaacgccatggcctggaaataacgtccgtgatcatcctggcatgattcaggtttttcttggccaaagtggaggacatgactctgacgggaatgaattacctcgccttgtctatgtttccagagagaagaggcctggctataatcaccacaaaaaggcaggagccatgaatgctttggtcagggtctccgctgtgcttacaaatgcgccttatcttttgaatctggattgtgatcactacttcaataatagtaaggctattagggaggcaatgtgcttcatgatggacccacttattggaaaaagagtgtgctacgtccagttccctcaaagattcgacggtatagataggcacgatcgatatgccaatcggaacaccgtgtttttcgatattaacatgaaaggtctggatggcattcaaggtcctatttatgttgggactggttgtgtattcagaaggctggcactctatggttatgatgctccaaaagcaaagaagccaccaaccagaacttgc

SEQ ID NO: 919 - DNA, 213 bp, Pinus radiata
cactgccctgtttggtatggatatggagggggtctgaaatggttggagaggctgtcttatataaatgcaaccgaatacccatggacatccatacctctggtggcatactgtaccttgccagctatatgtttgcttacaggaaaattcattattccagagctcagaaatatagcgagtctttggtttcttgccctctttatctgtatcttcaca

SEQ ID NO: 920 - DNA, 364 bp, Pinus radiata
cctcctcgccctgcattcaaagggtctgctcctataaatctttctgatcgtttgaaccaagtacttcgatgggcattgggttctgttgaaattcttctcagccgtcattgcccaatttggtatggttatggtggaaggctgaaatggctggagaggctagcatacataaacactacagtttatcccatcacttctatccctttggtggtttattgcacattgccagctatttgtcttctcactgggaagtttattataccacagattagcacattcgcaagtctcttttttattgcactctttctttccatttttgcaaccggtattctggaaatgcgatggagtggggttggtattgatgaat

SEQ ID NO: 921 - DNA, 291 bp, Eucalyptus grandis
gtcatatgaagcctataagaagcagcaacatagatggcattctggtccaatgcaactttttcgtttgtgtctacctgcgattgtaacttccaagatctctgcttggaagaaggcgaatctcatactcttattctttctacttaggaaactcattcttcccttctactccttcaccttgttctgcattatccttccgctaaccatgtttgtccctgaggctgagctccccatgtgggtcatatgttatgtgcccgttttcatgtcattcttaaacatcttcctgctccaaaa

SEQ ID NO: 922 - DNA, 1385 bp, Eucalyptus grandis
ttgcgaaagcaggaacgaaaaataccgttgggcagtatgagagccacactgccttcactcttccagggctgtacagagttgttcatgggattgatgtttttgatccaaagttcaacattgtctcccctggggcagatatgtgcatctatttcccctactctgaaaagcagaagagactcacagctttgcatggatcaatagaaaagctgctatatgatcctgaacaaaatgatgagcacataggatcattgtctgatcggtccaagcccatgatcttttccatggcaaggctggacaaagtgaagaatatgacagggctggttgaatgctatgctaagaattcaaaattgagggaactagcaaatcttgtagtggtggctggttacattgatgtgaagaagtcaaaggacagagaagagatagcagaaatcgaaaagatgcatgaactgatgaaggaatacaatttggatggtcaatttcgttggatggcggcccaaacaaatcgggcacgtaatggagagctttaccgctatatagcagacacaaaaggtgtttttgttcagccggctttttatgaagcttttggacttacagttgttgaggctatgacgtgcggccttccaacatttgccacttgtcatggtggtccggcagagataattgaacatggtgtatcaggatatcatattgatccatatcatcctgaccaggctgctaccctactggcagatttctttgagcaaagtaaaagggaccccaatcactggactaaaatctctgctgctggacttcagaggatctatgaaaggtacacctggaagatttattcagagaggctgatgacactggcaggggtttatggcttctggaagtatgtttcaaagctcgagaggcgtgagacccggcgatatcttgagatgttttacattcttaaattccgggaattggtgaaaactgttcccgtggcagccgacgagccccattaatctggtggcatcaccgaactcaagggggttgtcacccgggggcattcaccatgtaaatatttccgtctttcactccaatgcagaagcatgagcattccgtattgaataattgagggccagagttcatttgcgctcttgatatgatgatttccataaaataattctgcagcgaggttgtcaccatggtcacgaacgaaaaatggttgatggtgcggttgtcctaatctcgtgacagtaatgtatatgcatcatgagttccaaacctaagatgctgaattgccggtatcttaaggaggtcaaatataaaatgacctctggattattgaactctattaagatcatatatgaagtaacctctaatgaaaagctccattactccaaaaaaaaaaaaaaaaaaaa

SEQ ID NO: 923 - DNA, 484 bp, Pinus radiata
agctcttgccaattcactgctgatattcttgcaatgaataatgctgattgcatcattacaagcacataccaagaaattgcaggaagtgaggacacagttgggcagtatgaaagccacggtgcttttacactgcctgggcaataccgtgtagtctcaggcattgatgttttcgatcccaaattcaacattgtggctcctggagctgatatgagtatatatttcccttacaaagaaagagagagtcggcttacacatttccatgacgctattgaagaacttctgttcagtcctgttgacacacttgaacacaaaggaattctcaatgacaagaagaaacccatcattttttctatggctagactggaccgagtgaaaaatatgacaggactggttgaatggtttggaaaaagcagccggttgaggaagcttgtgaaccttgttgttgtcgctggttttattgattcgtccaaatcaaaagacagag

SEQ ID NO: 924 - DNA, 464 bp, Eucalyptus grandis
gattcatctcctattggatatactccaggctcctgatccctctactctagaaacatttcttgggaggatacctatggtgtttaacgttgtcattttgtctccacatggatactttgggcaagcaaatgtgttgggtttacctgacaccggtgggcaggttgtttacatactggatcaagttcgtgccttggagaatgaaatgttactgaggatacagaagcaggggctggatatagctcccaaaatccttattgttactaggctaatacctgattcaaagggaaccacctgtaatcagcggcttgaaagagttagtggaacagaacatagtcatatcttacgagttcctttcagatctgatcaaggaattctgcgtaaatggatctctcggtttgatgtgtggccttatctggagacgtttgccctggatgcagcacatgaaattacagcggagttacaaggct

SEQ ID NO: 925 - DNA, 381 bp, Pinus radiata
atagaaagctcagacagcgagcaaagcgtggtgtccattcttatggtcgttacatgcctcgaatgtcggttatacctcctggaatggacttcagcaatgttgtagtgcatgacgagaattcagataatgatttagataatgattctgttcaattgcccgagtctcctttatggggtgagatcccacggtttttgaacaatccctcgaagcccattattttggctcttgctcgacctgatcccaagaagaacatggccactttagtcaaggcttttggtgaatgtatcaaattgaggaagctggcaaacttgatgttaatcatgggcaatcgagatgatattgatcaaatgcccgcagcaagtgccaatgtgttgaccactg

SEQ ID NO: 926 - DNA, 382 bp, Pinus radiata
cagagtttgtagatggagcactgggtcatattcttaatatttccaaagcattgggagatctgattggagaagacacacctgtatggcctcatgtaatccatggccactatgcagatgcaggggatgctgcttgccttctttctggtgctctgaacgttccaatggttttgacaggccattctctaggccgaaataaactagaacaattattgaaacaaggattgcattccaaggaagatatcaatgcaacgtacaagatcatgcgtaggattgaagctgaagaattgtgccttgattccgctgagcttgtggtgacaagtacaaggcaagaaattgaagaacaatggggcttgtacgatggttttgatttggaactgaatag

SEQ ID NO: 927 - DNA, 354 bp, Eucalyptus grandis
ggagagaactagtcttgctttttctgtattgcagactctaattatggggaaccgtgatgaccttgatgaaatgtctaccacaaatgcagctgttcttctctccattcttaagctaatcgacaaatataatctatatggccaagtatcgtatccaaagcgccataagcaatctgatgttcctgacatttaccgtttagccgcaaaaacaaagggggtcttcatcaaccctgctttaattgagccatttggcctcactttgatcgaggcagctgcttatggtttacctgttgttgccacaaaaaatggtggtcctgttgatattcttcgggtgtgttcgagctggagccttatacc

SEQ ID NO: 928 - DNA, 609 bp, Pinus radiata
aatgcattccaccaaaagggaattggaactgtgggcgacatcgtcataaaccatcggtgcgggacgaagcgggacgataaagggtactggtgcgtctttgagggtgggaaggaggacggcactctggactggggaccctgggcggtcaccgtcaacgacaaaccatatgcgtgcggctccgggcaggcggacaccggcgaggacttcgtgtcagccccggacgtggaccacaccaatcccaagatacagcaagatttgtcggagtggatgaattggctcaaatccaatgtcggatttgatgggtggaggttcgactttgtcaagggctacgccggaaagctgctgggcggctatatacaaaacaccacccccaaattcgcagttggggagatgtgggacaccgatcgccaaaaagtggtggattgggtgcactcaacgggtgaccgagcctccgccttcgatttccctaccaaagggattctgcaggacgcactgaaatccaatgacctctccaacctaaaggattccgacggaaaacccgctggcatgatcggcctgttgccccagaaggcggtcacgttcattgaaaatcacgacaccggctccacc

SEQ ID NO: 929 - DNA, 170 bp, Eucalyptus grandis
gatgaggagaagcatcttattgctgctttccatccaaggggaatcaaatgcctggtccccatagcgattaaccacaggactgctgaaaaccaagatagccggggaatatggtgcatcttactaaggcggaacacccgacgaacgacttgactgggggccgtcctttattt

SEQ ID NO: 930 - DNA, 383 bp, Eucalyptus grandis
atgggtattaggacacaggaatgcaagtcagaggaggctaatcagtgagacttatcagcagctttatgaccaacccctcgtcgacagtcttcattctgaactctctggcgatttcggaaaagcagtgatcttttggacatatgatcctccagtgagggatgccatattggcaaacgaggccttgcagactaaaaggaaaggcataaaccacttacttccgattgttgagatcgcatgtgcgacatctccccaccatctcattgccgtaaggcaggcctactgttcactctataattgctcgctcgaggaagacatcttgtcaacaatatcttcacccttccgaaagacccttgtaggattggtgagccctatagatatgataa

SEQ ID NO: 931 - DNA, 446 bp, Pinus radiata
agtgtatttgctgtcctgaaaaacacttcacaaaggttttgtcgcttagcgatagaaaaactcgggacagatgaagatgcactaacacgggtggttgtaacacgtgcggaagttgacatgaagcatatcaaagaggcatatgctaagaggaccagcaagactttggaacatgcaatagcgtctgaaacctctggagactaccaggattttttgcttacattgataggcaaagatcatgcttaagctcattcatccgaatggcgccttttgaaacattcatgtctgaaatgaagagctttagaatcttaataatttcaagcacacaacctgtagacacttttctttgagtagtttcaaagttgtcttgactcactggatcataaacctttaagtttagaccctggtgattataagtatatatgttacgcaaaaaaaaaaaaaaaaaa

SEQ ID NO: 932 - DNA, 474 bp, Pinus radiata
ccgcaagactacagacctcccatggatggaagaggcacgcaagattacagacctcccatggatggtagaggcccgcaagactacagacctcccatggatggaagaggcccgcaagactacagacctcccgtggatgcaagaggccctcaagactacagacctcccgtggatgcaagaggccctcaagactacagaccttccgtggatggaagaggcccacaagactacaggccaccgatggatgcaagaggcccgcaagactacaggcaacctatggatgcaagaggtccgcaagactacaggcaacctgtggatgcaagaggtccaatggggggtgaccggcaggactacaggccacctatggaaggaaggggctcgatgccgggtgatcgacaggactacaggccaccaatggaaggaagaggcccaataccagggggtcaacgggactatgttccaccaacggaaggaaga

SEQ ID NO: 933 - DNA, 323 bp, Eucalyptus grandis
gagcttataccattatgatggatatcaagtgaacatgaatttggcaaaagctgacgctaagacactccacgagaagatctcaaagaaggtttacagccttgaggatctcgtaaggattttggctactaggagcaaagcacaggtcaatggtatgctgaatcagtataaaaatgagtttggaaatgatatcgacaagtgagttggaatttaaatgaactgaacctttcatgttgcttttacctacatgtctaaagtttacagttcctaaatgataaagagtgccggtgggtattgttcgctatgaagtttttggttagcagttg

SEQ ID NO: 934 - protein, 130 aa, Eucalyptus grandis
TWRRGARAPIGALFEVTKKDQSTSSDSTNAELGRFTFDESPIFVPGTALLLVHLIATFTMLLGLRPQASRSSGSGMGEVICTMWVVLCFWPFFRGLFGKGKYGIPSTTIMKGAIVATIIAYLFRFTPTGW

SEQ ID NO: 935 - protein, 172 aa, Eucalyptus grandis
EKSLLMSQMSLEKRFGQSAVFVASTLMENGGVPQSATPETLLKEAIHVISCGYEDKSEWGSEIGWIYGSVTEDILTGFKMHARGWRSIYCMPKLPAFKGSAPINLSDRLNQVLRWALGSVEILFSRHCPIWYGYGGRLKWLERFAYVNTTIYPVTAIPLLMYCTLPAVCLLT

SEQ ID NO: 936 - protein, 166 aa, Eucalyptus grandis
LLGTADDAKIINLTDVDIRLPLLVYVSREKRPGYDHNKKAGAMNALVRASAIMSNGPFMLNLDCDHYIYNSQALREGMCFMMDRGGDRICYVQFPQRFEGIDPSDRYANHNTVFFDVNMRALDGLQGPVYVGTGCLFRRVALYGFDPPRAKEHQPGCCNCCFDRRK

SEQ ID NO: 937 - protein, 306 aa, Eucalyptus grandis
MDDWKLQQGNLGPEPDDINDPDMAMIDEARQPLSRKVPIASSKINPYRMVIVARLAILAFFLRYRILNPVHDAFGLWLTSIICEIWFAFSWILDQFPKWFPIDRETYLDRLSLRYEREGEPNMLSPVDVFVSTVDPMKEPPLVTGNTVLSILAMDYPVDKISCYVSDDGASMLTFESLSETAEFARKWVPFCKKFSIEPRAPEMYFTLKIDYLKDKVQPTFVKERRAMKREYEEFKVRINALVAKAAKVPPEGWIMQDGTPWPGNNTKDHPGMIQVFLGHSGGLDADGNELPRLVYVSREKRSRRG

SEQ ID NO: 938 - protein, 159 aa, Eucalyptus grandis
LIYGSLRMPILQSMCYAELAFFPLFCLPICIFATIPQICLLNGIAIYPKVSSTYSMVFSLVFVSSLCKHLYEVVASGHSVRAFINEQRMWMIRSVTSHVYGTMDATLKQLGMRKASFSPTNKAADDQQSKRYEMGVFDFQTSTMFLAPMVTAVILNVAC

SEQ ID NO: 939 - protein, 196 aa, Eucalyptus grandis
FKVRINALVAKAQKVPEEGWTMQDGTPWPGNNVRDHPGMIQVFLGQSGGHDSDGNELPRLVYVSREKRPGYNHHKKAGAMNALVRVSAVLTNAPYLLNLDCDHYFNNSKAIREAMCFMMDPLIGKRVCYVQFPQRFDGIDRHDRYANRNTVFFDINMKGLDGIQGPIYVGTGCVFRRLALYGYDAPKAKKPPTRTC

SEQ ID NO: 940 - protein, 71 aa, Pinus radiata
HCPVWYGYGGGLKWLERLSYINATEYPWTSIPLVAYCTLPAICLLTGKFIIPELRNIASLWFLALFICIFT

SEQ ID NO: 941 - protein, 121 aa, Pinus radiata
PPRPAFKGSAPINLSDRLNQVLRWALGSVEILLSRHCPIWYGYGGRLKWLERLAYINTTVYPITSIPLVVYCTLPAICLLTGKFIIPQISTFASLFFIALFLSIFATGILEMRWSGVGIDE

SEQ ID NO: 942 - protein, 96 aa, Eucalyptus grandis
SYEAYKKQQHRWHSGPMQLFRLCLPAIVTSKISAWKKANLILLFFLLRKLILPFYSFTLFCIILPLTMFVPEAELPMWVICYVPVFMSFLNIFLLQ

SEQ ID NO: 943 - protein, 327 aa, Eucalyptus grandis
AKAGTKNTVGQYESHTAFTLPGLYRVVHGIDVFDPKFNIVSPGADMCIYFPYSEKQKRLTALHGSIEKLLYDPEQNDEHIGSLSDRSKPMIFSMARLDKVKNMTGLVECYAKNSKLRELANLVVVAGYIDVKKSKDREEIAEIEKMHELMKEYNLDGQFRWMAAQTNRARNGELYRYIADTKGVFVQPAFYEAFGLTVVEAMTCGLPTFATCHGGPAEIIEHGVSGYHIDPYHPDQAATLLADFFEQSKRDPNHWTKISAAGLQRIYERYTWKIYSERLMTLAGVYGFWKYVSKLERRETRRYLEMFYILKFRELVKTVPVAADEPH

SEQ ID NO: 944 - protein, 161 aa, Pinus radiata
SSCQFTADILAMNNADCIITSTYQEIAGSEDTVGQYESHGAFTLPGQYRVVSGIDVFDPKFNIVAPGADMSIYFPYKERESRLTHFHDAIEELLFSPVDTLEHKGILNDKKKPIIFSMARLDRVKNMTGLVEWFGKSSRLRKLVNLVVVAGFIDSSKSKDR

SEQ ID NO: 945 - protein, 154 aa, Eucalyptus grandis
IHLLLDILQAPDPSTLETFLGRIPMVFNVVILSPHGYFGQANVLGLPDTGGQVVYILDQVRALENEMLLRIQKQGLDIAPKILIVTRLIPDSKGTTCNQRLERVSGTEHSHILRVPFRSDQGILRKWISRFDVWPYLETFALDAAHEITAELQG

SEQ ID NO: 946 - protein, 126 aa, Pinus radiata
RKLRQRAKRGVHSYGRYMPRMSVIPPGMDFSNVVVHDENSDNDLDNDSVQLPESPLWGEIPRFLNNPSKPIILALARPDPKKNMATLVKAFGECIKLRKLANLMLIMGNRDDIDQMPAASANVLTT

SEQ ID NO: 947 - protein, 126 aa, Pinus radiata
EFVDGALGHILNISKALGDLIGEDTPVWPHVIHGHYADAGDAACLLSGALNVPMVLTGHSLGRNKLEQLLKQGLHSKEDINATYKIMRRIEAEELCLDSAELVVTSTRQEIEEQWGLYDGFDLELN

SEQ ID NO: 948 - protein, 117 aa, Eucalyptus grandis
ERTSLAFSVLQTLIMGNRDDLDEMSTTNAAVLLSILKLIDKYNLYGQVSYPKRHKQSDVPDIYRLAAKTKGVFINPALIEPFGLTLIEAAAYGLPVVATKNGGPVDILRVCSSWSLI

SEQ ID NO: 949 - protein, 203 aa, Pinus radiata
NAFHQKGIGTVGDIVINHRCGTKRDDKGYWCVFEGGKEDGTLDWGPWAVTVNDKPYACGSGQADTGEDFVSAPDVDHTNPKIQQDLSEWMNWLKSNVGFDGWRFDFVKGYAGKLLGGYIQNTTPKFAVGEMWDTDRQKVVDWVHSTGDRASAFDFPTKGILQDALKSNDLSNLKDSDGKPAGMIGLLPQKAVTFIENHDTGST

SEQ ID NO: 950 - protein, 49 aa, Eucalyptus grandis
DEEKHLIAAFHPRGIKCLVPIAINHRTAENQDSRGIWCILLRRNTRRTT

SEQ ID NO: 951 - protein, 127 aa, Eucalyptus grandis
WVLGHRNASQRRLISETYQQLYDQPLVDSLHSELSGDFGKAVIFWTYDPPVRDAILANEALQTKRKGINHLLPIVEIACATSPHHLIAVRQAYCSLYNCSLEEDILSTISSPFRKTLVGLVSPIDMI

SEQ ID NO: 952 - protein, 80 aa, Pinus radiata
SVFAVLKNTSQRFCRLAIEKLGTDEDALTRVVVTRAEVDMKHIKEAYAKRTSKTLEHAIASETSGDYQDFLLTLIGKDHA

SEQ ID NO: 953 - protein, 158 aa, Pinus radiata
PQDYRPPMDGRGTQDYRPPMDGRGPQDYRPPMDGRGPQDYRPPVDARGPQDYRPPVDARGPQDYRPSVDGRGPQDYRPPMDARGPQDYRQPMDARGPQDYRQPVDARGPMGGDRQDYRPPMEGRGSMPGDRQDYRPPMEGRGPIPGGQRDYVPPTEGR

SEQ ID NO: 954 - protein, 65 aa, Eucalyptus grandis
SLYHYDGYQVNMNLAKADAKTLHEKISKKVYSLEDLVRILATRSKAQVNGMLNQYKNEFGNDIDK

SEQ ID NO: 955 - DNA, 3748 bp, Eucalyptus grandis
cggggatttccaagtctccaccccattgacgtcaatgggagtttgttttggcaccaaaatcaacgggactttccaaaatgtcgtaacaactccgccccattgacgcaaatgggcggtaggcgtgtacggtgggaggtctatataagcagagctggtttagtgaaccgtcagatccgctagccgcaattactgtgagttagctcactcattaggcaccccaggctttacactttatacttccggctcggtatattgtgtggaattgtgagcggataacaatttcacacaggaaacagctatgaccttgattacgccaagctcgaaattaaccctcactaaagggaacaaaagctggagctcgcgcgcctgcaggtcgacactagtggatccaaagaattcgggcacgagctcttctcgtctcgctttctcatataaagaagtgaaagaatacgaggatactccacttgggtatcgccaagaactcattgggtcgcgagaagattggccaacatgatggaatccggggttcccctgtgcaacacttgcggagaggctgttggggttgatgagaaaggcgaggtcttcgtggcttgtcaagagtgcaacttcgccatttgcaaggcttgtgtcgaatatgagattaaggaaggaagaaaagcgtgcttgcgctgtggcactccatttgaagcgaactcgatggctgatgctgagagaaatgaattgggaagtcgatcgacaatggcagctcaactcaatgatcctcaggacacagggattcatgctagacacatcagcagtgtttctacgttggatagtgaatacaatgatgagactgggaaccctatctggaagaatagagtggagagctggaaggacaaaaagaataagaagaagaaggccccgacgaaggctgagaaagaggctcaagttccaccagagcagcagatggaagagaagcaaattgctgatgcttcagagccactctcgaccgttattcccattgccaaaagcaaactcgcaccataccgaaccgtaataataatgcgattgatcattttggcacttttcttccattaccgagtgacacatccagtcgacagcgcctatccattgtggcttacatccatcatatgtgagatttggttcgcatactcatgggtgttggatcagttcccgaagtggtctcccgtgaataggattactcatgttgacagactatctgcaaggtatgaaaaagaaggtgaaccttcagagcttgctgctgtcgacttcttcgtgagtacagtcgatccaatgaaagaaccacctttgatcactgccaatacagtgctttccatccttgctgtggactatcctgttgataaagtctcttgttatctttctgatgatggtgctgcgatgctctcattcgagtctcttgttgaaacggccgactttgcaagaaagtgggtacctttctgcaaaaagtattcgattgagccccgtgcgcctgagttctacttttctcagaagattgactacttgaaggataaaattcagccttcttttgtgaaggaacgaagagcaatgaaaagagactatgaggagttcaaagttcgagttaatgctttggtagcaaaagcgcagaaagcgccggaggaaggttggtctatgcaggatgggacaccttggcctggaaataactctcgtgaccaccctggaatgattcaggttttcctcggaagtagtggagcccacgacatcgagggaaatgaacttcctcggctggtgtatgtttccagagagaagagacccggtttccaacatcataaaaaggccggagcggaaaatgctctggtgagagtatctgcaattctgacaaatgctccgtacatcctcaaccttgactgcgatcattatgtcaactatagtaatgctgttcgtgaagcaatgtgcttcctgatggatcctcaagttggtagaaatttgtgctatgtgcagttccctcagagatttgatggtatcgatcgcagtgatcgatatgccaaccgaaataccgttttctttgatgttaacatgaaagggctggatggaatccaaggaccagtttatgtcgggacaggatgtgttttcaataggcaagcactttacggatacggacccccttctatgccgaatttaccaaagccctcctcatcatgctcctggtgtggctgctgctcttgttgctgcccttcaaagaagcccactaaagatctctcagaagtttaccgagactcaaaaagggaagacctaaatgccgccatcttcaaccttggagagattgacaattatgatgagcatgagagatcaatgctgatctctcagatgagctttgagaaaacttttggcttgtccactgtgtttattgagtcgacgctgttggcaaatggaggagttcctgaatctgcccatccgtctatgctgatcaaagaagccattcatgtcattagctgtggctatgaagagaagaccgcatggggcaaagagatcggttggatatatggctcggttactgaggatatcttaacagggttcaagatgcactgcagaggatggaggtcggtctattgcatgcccttaaggcctgcattcaagggatcagcgcccattaatttgtcagacagactgcaccaagttctccgatgggctctgggttccgtggaaatattcttgagtagacattgtccactttggtatggatttggcggaggccgcctcaagtggcttcaaagattggcgtacataaacaccatcgtttatccattcacatccctccctcttgtcgcttattgcacaattcctgcgatctgcctccttactggaaagttcatcattccaacgctttccaacttggcaagcgtgctatttcttggtcttttcctctccatcatcgtcacaagtgtgctcgagctgcgatggagtggcgtgagcattgaggactggtggcgtaacgagcagttctgggtgattggaggtgtctcagcccatctctttgccgtcttccaaggattcctgaagatgttagctggcctagacaccaacttcaccgtcactaccaaagcagccgacgacgcggagtttggtgagctctacatgatcaagtggacgacgctgctgatacccccgaccactcttctcatcgtgaacatggtgggtgtcgttgccgggttctccgatgcgctgaacaaaggttatgaggcgtggggacccctctttggcaaggtcttctttgcattctgggtgattcttcatctctatccattcctgaaaggtctcatgggtaggcagaacaggactccgaccattgtggttctctggtcggtgcttctggcttctgtcttctctctcgtctgggtgaagatcgatccattcgtgagcaaatccgatgctgacctctcccagagctgcagttctatagattgttgaattgcgcgagtgttggcttgtgtttatcaaggatctcaagctgtttttgcagttttgcgcctcttgaagattggggaaataccgagtttatgatgttggaaatttgctaaagaaagggtgattattgtattcatgaattgatatgtagaggcgagacatttttcctcactatcccaaaaattcctggctttgtgtacttgtaaaatggtacgagaaagaaagagtattccctgtatttcttgaacaatttaacattagaatgtgcgatgcatggtgatcaaaatctaaaaaaaaaaaaaaa

SEQ ID NO: 956 - protein, 978 aa, Eucalyptus grandis
MMESGVPLCNTCGEAVGVDEKGEVFVACQECNFAICKACVEYEIKEGRKACLRCGTPFEANSMADAERNELGSRSTMAAQLNDPQDTGIHARHISSVSTLDSEYNDETGNPIWKNRVESWKDKKNKKKKAPTKAEKEAQVPPEQQMEEKQIADASEPLSTVIPIAKSKLAPYRTVIIMRLIILALFFHYRVTHPVDSAYPLWLTSIICEIWFAYSWVLDQFPKWSPVNRITHVDRLSARYEKEGEPSELAAVDFFVSTVDPMKEPPLITANTVLSILAVDYPVDKVSCYLSDDGAAMLSFESLVETADFARKWVPFCKKYSIEPRAPEFYFSQKIDYLKDKIQPSFVKERRAMKRDYEEFKVRVNALVAKAQKAPEEGWSMQDGTPWPGNNSRDHPGMIQVFLGSSGAHDIEGNELPRLVYVSREKRPGFQHHKKAGAENALVRVSAILTNAPYILNLDCDHYVNYSNAVREAMCFLMDPQVGRNLCYVQFPQRFDGIDRSDRYANRNTVFFDVNMKGLDGIQGPVYVGTGCVFNRQALYGYGPPSMPNLPKPSSSCSWCGCCSCCCPSKKPTKDLSEVYRDSKREDLNAAIFNLGEIDNYDEHERSMLISQMSFEKTFGLSTVFIESTLLANGGVPESAHPSMLIKEAIHVISCGYEEKTAWGKEIGWIYGSVTEDILTGFKMHCRGWRSVYCMPLRPAFKGSAPINLSDRLHQVLRWALGSVEIFLSRHCPLWYGFGGGRLKWLQRLAYINTIVYPFTSLPLVAYCTIPAICLLTGKFIIPTLSNLASVLFLGLFLSIIVTSVLELRWSGVSIEDWWRNEQFWVIGGVSAHLFAVFQGFLKMLAGLDTNFTVTTKAADDAEFGELYMIKWTTLLIPPTTLLIVNMVGVVAGFSDALNKGYEAWGPLFGKVFFAFWVILHLYPFLKGLMGRQNRTPTIVVLWSVLLASVFSLVWVKIDPFVSKSDADLSQSCSSIDC

We claim:

1. An isolated polynucleotide comprising a nucleotide sequence selected from the group consisting of: SEQ ID NOS: 1-29, 57-80, 105, 107, 109-113, 119-128, 139-143, 149-933 and 955.

2. An isolated polynucleotide comprising a nucleotide sequence selected from the group consisting of:
(a) complements of the sequences recited in SEQ ID NOS: 1-29, 57-80, 105, 107, 109-113, 119-128, 139-143, 149-933 and 955;
(b) reverse complements of the sequences recited in SEQ ID NOS: 1-29, 57-80, 105, 107, 109-113, 119-128, 139-143, 149-933 and 955; and
(c) reverse sequences of the sequences recited in SEQ ID NOS: 1-29, 57-80, 105, 107, 109-113, 119-128, 139-143, 149-933 and 955;

3. An isolated polynucleotide comprising a nucleotide sequence selected from the group consisting of:
(a) nucleotide sequences having at least 75% identity to a nucleotide sequence recited in SEQ ID NOS: 1-29, 57-80, 105, 107, 109-113, 119-128, 139-143, 149-933 and 955;
(b) nucleotide sequences having at least 90% identity to a nucleotide sequence recited in SEQ ID NOS: 1-29, 57-80, 105, 107, 109-113, 119-128, 139-143, 149-933 and 955; and
(c) nucleotide sequences having at least 95% identity to a nucleotide sequence recited in SEQ ID NOS: 1-29, 57-80, 105, 107, 109-113, 119-128, 139-143, 149-933 and 955,
wherein the polynucleotide encodes a polypeptide having substantially the same functional properties as a polypeptide encoded by SEQ ID NO: 1-29, 57-80, 105, 107, 109-113, 119-128, 139-143, 149-933 and 955.

4. An isolated polynucleotide comprising a nucleotide sequence selected from the group consisting of:
(a) nucleotide sequences that hybridize to a sequence recited in SEQ ID NO: 1-29, 57-80, 105, 107, 109-113, 119-128, 139-143, 149-933 and 955 under stringent hybridization conditions;
(b) nucleotide sequences that are 200-mers of a sequence recited in SEQ ID NO: 1-29, 57-80, 105, 107, 109-113, 119-128, 139-143, 149-933 and 955;
(c) nucleotide sequences that are 100-mers of a sequence recited in SEQ ID NO: 1-29, 57-80, 105, 107, 109-113, 119-128, 139-143, 149-933 and 955;
(d) nucleotide sequences that are 40-mers of a sequence recited in SEQ ID NO: 1-29, 57-80, 105, 107, 109-113, 119-128, 139-143, 149-933 and 955;
(e) nucleotide sequences that are 20-mers of a sequence recited in SEQ ID NO: 1-29, 57-80, 105, 107, 109-113, 119-128, 139-143, 149-933 and 955; and
(f) nucleotide sequences that are degeneratively equivalent to a sequence recited in SEQ ID NO: 1-29, 57-80, 105, 107, 109-113, 119-128, 139-143, 149-933 and 955.

5. An oligonucleotide probe or primer comprising at least 10 contiguous residues complementary to 10 contiguous residues of a nucleotide sequence recited in SEQ ID NO: 1-29, 57-80, 105, 107, 109-113, 119-128, 139-143, 149-933 and 955.

6. A kit comprising a plurality of oligonucleotide probes or primers of claim 5.

7. A genetic construct comprising a polynucleotide of any one of claims 1-4.

8. A transgenic cell comprising a genetic construct according to claim 7.

9. A genetic construct comprising, in the 5′-3′ direction:
(a) a gene promoter sequence;
(b) a polynucleotide sequence comprising at least one of the following: (1) a polynucleotide of claim 1; (2) a polynucleotide coding for at least a functional portion of a polypeptide encoded by a polynucleotide of claim 1; (3) an open reading frame of a polynucleotide of claim 1; and (4) a polynucleotide sequence comprising a non-coding region of a polynucleotide of claim 1; and
(c) a gene termination sequence.

10. The genetic construct of claim 9, wherein the polynucleotide sequence is in a sense orientation.

11. The genetic construct of claim 9, wherein the polynucleotide sequence is in an antisense orientation.

12. The genetic construct of claim 9, wherein the gene promoter sequence is functional in a plant host to provide for transcription in xylem.

13. A transgenic plant cell comprising a genetic construct of claim 9.

14. A plant comprising a transgenic plant cell according to claim 13, or a part, propagule or progeny thereof.

15. A method for modulating one or more of the polysaccharide content, the polysaccharide composition and the polysaccharide structure of a plant, comprising stably incorporating into the genome of the plant a polynucleotide of any one of claims 1-4.

16. The method of claim 15, wherein the plant is selected from the group consisting of eucalyptus and pine species.

17. A method for producing a plant having one or more of altered polysaccharide content, altered polysaccharide composition and altered polysaccharide structure, comprising:
(a) transforming a plant cell with a genetic construct of claim 9 to provide a transgenic cell; and
(b) cultivating the transgenic cell under conditions conducive to regeneration and mature plant growth.

18. A method for modifying the activity of a polypeptide involved in a polysaccharide biosynthetic pathway in a plant comprising stably incorporating into the genome of the plant a genetic construct of claim 9.

19. An isolated polypeptide comprising an amino acid sequence selected from the group consisting of: SEQ ID NOS: 30-56, 81-104, 106, 108, 114-118, 129-138, 144-148, 934-954 and 956.

20. An isolated polypeptide comprising an amino acid sequence selected from the group consisting of:
(a) sequences having at least 70% identity to a sequence of SEQ ID NOS: 30-56, 81-104, 106, 108, 114-118, 129-138, 144-148,934-954 and 956;
(b) sequences having at least 90% identity to a sequence of SEQ ID NOS: 30-56, 81-104, 106, 108, 114-118, 129-138, 144-148, 934-954 and 956; and
(c) sequences having at least 95% identity to a sequence of SEQ ID NOS: 30-56, 81-104, 106, 108, 114-118, 129-138, 144-148,934-954 and 956,
wherein the polypeptide has substantially the same functional properties as a polypeptide of SEQ ID NOS: 30-56, 81-104, 106, 108, 114-118, 129-138, 144-148, 934-954 and 956.

21. An isolated polypeptide encoded by an isolated polynucleotide sequence of claim 1.
